(19) United States
(12) Patent Application Publication
(10) Pub. No.: US 2024/0368596 A1
(43) Pub. Date: Nov. 7, 2024

(54) DYSTROPHIN EXON SKIPPING OLIGONUCLEOTIDES

(71) Applicant: BioMarin Pharmaceutical Inc., NOVATO, CA (US)

(72) Inventors: Thomas Aaron Hartl, San Rafael, CA (US); Josh Christopher Woloszynek, Novato, CA (US); Steven Michael Froelich, Corte Madera, CA (US); Charles Francis Koehler, V, San Francisco, CA (US); Jenna-Marie Magat, Pacifica, CA (US); Isha Dhami, Mill Valley, CA (US); Benjamin Spangler, Richmond, CA (US); Debobrato Das, Novato, CA (US); Brett Eugene Crawford, Tiburon, CA (US)

(21) Appl. No.: 18/654,260

(22) Filed: May 3, 2024

Related U.S. Application Data
(60) Provisional application No. 63/500,503, filed on May 5, 2023.
(60) Provisional application No. 63/623,904, filed on Jan. 23, 2024.

(51) Int. Cl. C12N 15/113

(52) U.S. Cl. CPC C12N 15/113; C12N 2310/11; C12N 2310/315; C12N 2310/321; C12N 2310/3231; C12N 2310/3341; C12N 2310/335; C12N 2310/3525

(57) ABSTRACT

Provided herein are antisense oligonucleotides (ASOs) that induce skipping of exon 53 of human dystrophin pre-mRNA, and pharmaceutically acceptable derivatives thereof. Also provided are pharmaceutical compositions containing the ASOs and methods of using the ASOs and compositions for treating a subject with Duchenne muscular dystrophy.

### RELATED APPLICATIONS

[0001] This application claims priority to U.S. provisional patent application Nos. 63/500,503, filed May 5, 2023, and 63/623,904, filed Jan. 23, 2024. The disclosures of the above-referenced applications are incorporated by reference herein in their entireties.

### SEQUENCE LISTING

[0002] This application contains a Sequence Listing, which is being submitted herewith as an XML filed named “035107WO_SL.xml”, created on May 2, 2024, size 19,194,860 bytes, which is incorporated by reference herein in its entirety.

### FIELD

[0003] Provided herein are antisense oligonucleotides for use in compositions and methods of dystrophin exon skipping and treating Duchenne muscular dystrophy.

### BACKGROUND

[0004] Antisense oligonucleotides (ASOs) are in (pre) clinical development for many diseases and conditions, including cancer, inflammatory conditions, cardiovascular disease and neurodegenerative and neuromuscular disorders. Their mechanism of action is aimed at various targets, such as RNaseH-mediated degradation of target RNA in the nucleus or cytoplasm, at splice-modulation (exon inclusion or skipping) in the nucleus, or at translation inhibition by steric hindrance of ribosomal subunit binding in the cytoplasm. Splice-modulating or splice-switching ASOs were first described for correction of aberrant splicing in human β-globin pre-mRNAs (Dominski and Kole PNAS, 1993, 90 (18): 8673-8677), and are currently being studied for a variety of genetic disorders.

[0005] ASOs have been extensively studied in the treatment of the neuromuscular disorders Duchenne muscular dystrophy (DMD) and Becker muscular dystrophy (BMD). Duchenne muscular dystrophy (DMD) and Becker muscular dystrophy (BMD) are the most common childhood forms of muscular dystrophy. DMD is a severe, lethal neuromuscular disorder resulting in a dependency on wheelchair support before the age of 12 and patients often die before the age of thirty due to respiratory or heart failure. It is caused by reading frame-shifting deletions (˜67%) or duplications (˜7%) of one or more exons, or by point mutations (˜25%) in the 2.24 Mb dystrophin gene, resulting in the absence of functional dystrophin. BMD is also caused by mutations in the dystrophin gene, but these maintain the open reading frame, yield semi-functional dystrophin proteins, and result in a typically much milder phenotype and longer lifespan.

[0006] To date, four ASOs have been approved for treatment of DMD: eteplirsen, golodirsen, casimersen and viltolarsen. However, these drugs possess limited efficacy and are each approved for treating only a small percentage of DMD patients.

[0007] Thus, there is a continuing need for exon skipping ASOs for use in compositions and methods of treating DMD.

### SUMMARY

[0008] Provided herein are ASOs for use in compositions and methods for treating DMD. The ASOs provided herein are reverse complementary to a portion of exon 53 of human dystrophin pre-mRNA. In one embodiment, the ASOs provided herein contain at least one modification, as defined herein. In another embodiment, the ASOs provided herein are 2′-O-methoxyethyl (“2′-MOE”) RNA oligonucleotides having a phosphorothioate backbone. In another embodiment, the ASOs provided herein are 2′-MOE RNA oligonucleotides having a phosphorothioate backbone, where all cytosines are replaced with 5-methylcytosine and all uracils are replaced with thymine. In another embodiment, the ASOs provided herein contain at least one 2′-OMe RNA nucleotide. In another embodiment, the ASOs provided herein contain at least one 2′-F RNA nucleotide. In another embodiment, the ASOs provided herein contain at least one LNA nucleotide.

[0009] Also provided herein are methods of treating DMD by administering an ASO or composition provided herein. Also provided herein are methods of delaying the onset of DMD by administering an ASO or composition provided herein.

### DETAILED DESCRIPTION

### I. Definitions

[0010] To facilitate understanding of the disclosure set forth herein, a number of terms are defined below.

[0011] Unless defined otherwise, all technical and scientific terms used herein have the same meaning as is commonly understood by one of ordinary skill in the art. All patents, applications, published applications and other publications are incorporated by reference in their entirety. In the event that there are a plurality of definitions for a term herein, those in this section prevail unless stated otherwise.

[0012] The singular forms “a,” “an,” and “the” include plural references, unless the context clearly dictates otherwise.

[0013] As used herein “subject” is an animal, such as a mammal, including human, such as a patient.

[0014] As used herein, biological activity refers to the in vivo activities of a compound or physiological responses that result upon in vivo administration of a compound, composition or other mixture. Biological activity, thus, encompasses therapeutic effects and pharmacokinetic behavior of such compounds, compositions and mixtures. Biological activities can be observed in in vitro systems designed to test for such activities.

[0015] As used herein, pharmaceutically acceptable derivatives of a compound include, but are not limited to, salts, esters, enol ethers, enol esters, acetals, ketals, orthoesters, hemiacetals, hemiketals, acids, bases, clathrates, solvates or hydrates thereof. Such derivatives may be readily prepared by those of skill in this art using known methods for such derivatization. The compounds produced may be administered to animals or humans without substantial toxic effects and either are pharmaceutically active or are prodrugs.

[0016] Pharmaceutically acceptable salts include, but are not limited to, amine salts, such as but not limited to N,N′-dibenzylethylenediamine, chloroprocaine, choline, ammonia, diethanolamine and other hydroxyalkylamines, ethylenediamine, N-methylglucamine, procaine, N-benzylphenethylamine, 1-para-chlorobenzyl-2-pyrrolidin-1′-ylmethylbenzimidazole, diethylamine and other alkylamines, piperazine and tris(hydroxymethyl)aminomethane; alkali metal salts, such as but not limited to lithium, potassium and sodium; alkali earth metal salts, such as but not limited to barium, calcium and magnesium; transition metal salts, such as but not limited to zinc; and inorganic salts, such as but not limited to, sodium hydrogen phosphate and disodium phosphate; and also including, but not limited to, salts of mineral acids, such as but not limited to hydrochlorides and sulfates; and salts of organic acids, such as but not limited to acetates, lactates, malates, tartrates, citrates, ascorbates, succinates, butyrates, valerates, mesylates, and fumarates. Pharmaceutically acceptable esters include, but are not limited to, alkyl, alkenyl, alkynyl, aryl, aralkyl, and cycloalkyl esters of acidic groups, including, but not limited to, carboxylic acids, phosphoric acids, phosphinic acids, sulfonic acids, sulfinic acids and boronic acids. Pharmaceutically acceptable enol ethers include, but are not limited to, derivatives of formula C═C(OR) where R is alkyl, alkenyl, alkynyl, aryl, aralkyl and cycloalkyl. Pharmaceutically acceptable enol esters include, but are not limited to, derivatives of formula C═C(OC(O) R) where R is hydrogen, alkyl, alkenyl, alkynyl, aryl, aralkyl and cycloalkyl. Pharmaceutically acceptable solvates and hydrates are complexes of a compound with one or more solvent or water molecules, or 1 to about 100, or 1 to about 10, or one to about 2, 3 or 4, solvent or water molecules.

[0017] As used herein, treatment means any manner in which one or more of the symptoms of a disease or disorder are ameliorated or otherwise beneficially altered. Treatment also encompasses any pharmaceutical use of the compositions herein, such as use for treating DMD.

[0018] As used herein, amelioration of the symptoms of a particular disorder by administration of a particular compound or pharmaceutical composition refers to any lessening, whether permanent or temporary, lasting or transient that can be attributed to or associated with administration of the compound or pharmaceutical composition.

[0019] As used herein, and unless otherwise indicated, the terms “manage,” “managing” and “management” encompass preventing the recurrence of the specified disease or disorder in a subject who has already suffered from the disease or disorder, and/or lengthening the time that a subject who has suffered from the disease or disorder remains in remission. The terms encompass modulating the threshold, development and/or duration of the disease or disorder, or changing the way that a subject responds to the disease or disorder.

[0020] Where moieties are specified by their conventional chemical formulae, written from left to right, they equally encompass the chemically identical moieties that would result from writing the structure from right to left, e.g., —CH₂O— is equivalent to —OCH₂—.

[0021] The term “alkyl,” by itself or as part of another substituent, means, unless otherwise stated, a straight (i.e., unbranched) or branched chain saturated hydrocarbon radical, which can include di- and multivalent radicals, having the number of carbon atoms designated (i.e., C₁-C₁₀ means one to ten carbons). Examples of alkyl groups include, but are not limited to, groups such as methyl, ethyl, n-propyl, isopropyl, n-butyl, t-butyl, isobutyl, sec-butyl, homologs and isomers of, for example, n-pentyl, n-hexyl, n-heptyl, n-octyl, and the like.

[0022] The term “alkenyl,” by itself or as part of another substituent, means, unless otherwise stated, a straight (i.e., unbranched) or branched chain hydrocarbon radical having one or more carbon-carbon double bonds, which can include di- and multivalent radicals, having the number of carbon atoms designated (i.e., C₁-C₁₀ means one to ten carbons). Examples of alkenyl groups include, but are not limited to, vinyl (i.e., ethenyl), 2-propenyl, crotyl, 2-isopentenyl, 2-(butadienyl), 2,4-pentadienyl, 3-(1,4-pentadienyl), and the higher homologs and isomers.

[0023] The term “alkynyl,” by itself or as part of another substituent, means, unless otherwise stated, a straight (i.e., unbranched) or branched chain hydrocarbon radical having one or more carbon-carbon triple bonds, which can include di- and multivalent radicals, having the number of carbon atoms designated (i.e., C₁-C₁₀ means one to ten carbons). Examples of alkynyl groups include, but are not limited to, ethynyl, 1- and 3-propynyl, 3-butynyl, and the higher homologs and isomers.

[0024] The term “alkylene” by itself or as part of another substituent means a divalent radical derived from an alkyl, as exemplified, but not limited, by —CH₂CH₂CH₂CH₂—. Typically, an alkyl (or alkylene) group will have from 1 to 24 carbon atoms, including those groups having 10 or fewer carbon atoms. A “lower alkyl” or “lower alkylene” is a shorter chain alkyl or alkylene group, generally having six or fewer carbon atoms.

[0025] The terms “alkoxy,” “alkylamino,” and “alkylthio” (or thioalkoxy) are used in their conventional sense, and refer to those alkyl groups attached to the remainder of the molecule via an oxygen atom, an amino group, or a sulfur atom, respectively.

[0026] The term “heteroalkyl,” by itself or in combination with another term, means, unless otherwise stated, a straight or branched chain hydrocarbon radical, consisting of a heteroatom selected from the group consisting of O, N, P, Si and S, and wherein the nitrogen and sulfur atoms may optionally be oxidized and the nitrogen atom may have an alkyl substituent to fulfill valency and/or may optionally be quaternized. The heteroatom(s) O, N, P, Si and S may be placed at any interior position of the heteroalkyl group. Examples include, but are not limited to, —CH₂—CH₂—O—CH₃, —CH₂—CH₂—NH—CH₃, —CH₂—CH₂—N(CH₃)—CH₃, —CH₂—S—CH₂—CH₃, —CH₂—CH₂—S(O)—CH₃, —CH₂—CH₂—S(O)₂—CH₃, —CH—CH—O—CH₃, —CH₂—CH═N—OCH₃, and —CH═CH—N(CH₃)—CH₃. Up to two heteroatoms may be consecutive, such as, for example, —CH₂—NH—OCH₃ and —CH₂—O—Si(CH₃)₃. Similarly, the term “heteroalkylene” by itself or as part of another substituent means a divalent radical derived from heteroalkyl, as exemplified, but not limited by, —CH₂—CH₂—S—CH₂—CH₂— and —CH₂—S—CH₂—CH₂—NH—CH₂—. For alkylene and heteroalkylene linking groups, no orientation of the linking group is implied by the direction in which the formula of the linking group is written. For example, the formula-C(O)₂R′— represents both —C(O)₂R′— and —R′C(O)₂—.

[0027] The terms “cycloalkyl” and “heterocycloalkyl”, by themselves or in combination with other terms, represent, unless otherwise stated, cyclic versions of “alkyl” and “heteroalkyl”, respectively, including bicyclic, tricyclic and bridged bicyclic groups. Additionally, for heterocycloalkyl, a heteroatom can occupy the position at which the heterocycle is attached to the remainder of the molecule. Examples of cycloalkyl include, but are not limited to, cyclopentyl, cyclohexyl, 1-cyclohexenyl, 3-cyclohexenyl, cycloheptyl, norbornanyl, bicyclo[2.2.2]octanyl, and the like. Examples of heterocycloalkyl include, but are not limited to, 1-(1,2,5,6-tetrahydropyridyl), 1-piperidinyl, 2-piperidinyl, 3-piperidinyl, 4-morpholinyl, 3-morpholinyl, tetrahydrofuran-2-yl, tetrahydrofuran-3-yl, tetrahydrothien-2-yl, tetrahydrothien-3-yl, 1-piperazinyl, 2-piperazinyl, 1- or 2-azabicyclo[2.2.2]octanyl, and the like.

[0028] The terms “halo,” by itself or as part of another substituent, means, unless otherwise stated, a fluorine, chlorine, bromine, or iodine atom. Additionally, terms such as “haloalkyl,” are meant to include monohaloalkyl and polyhaloalkyl. For example, the term “halo(C₁-C₄)alkyl” is meant to include, but not be limited to, trifluoromethyl, 2,2,2-trifluoroethyl, 4-chlorobutyl, 3-bromopropyl, and the like.

[0029] The term “aryl” means, unless otherwise stated, a polyunsaturated, aromatic, hydrocarbon substituent which can be a single ring or multiple rings (in one embodiment from 1 to 3 rings) which are fused together or linked covalently. The term “heteroaryl” refers to aryl groups that contain from one to four heteroatoms selected from N, O, and S in the ring(s), wherein the nitrogen and sulfur atoms are optionally oxidized, and the nitrogen atom(s) are optionally quaternized. A heteroaryl group can be attached to the remainder of the molecule through a carbon or heteroatom. Non-limiting examples of aryl and heteroaryl groups include phenyl, 1-naphthyl, 2-naphthyl, 4-biphenyl, 1-pyrrolyl, 2-pyrrolyl, 3-pyrrolyl, 3-pyrazolyl, 2-imidazolyl, 4-imidazolyl, pyrazinyl, 2-oxazolyl, 4-oxazolyl, 5-oxazolyl, 3-isoxazolyl, 4-isoxazolyl, 5-isoxazolyl, 2-thiazolyl, 4-thiazolyl, 5-thiazolyl, 2-furyl, 3-furyl, 2-thienyl, 3-thienyl, 2-pyridyl, 3-pyridyl, 4-pyridyl, 2-pyrimidyl, 4-pyrimidyl, 5-benzothiazolyl, purinyl, 2-benzimidazolyl, 5-indolyl, 1-isoquinolyl, 5-isoquinolyl, 2-quinoxalinyl, 5-quinoxalinyl, 3-quinolyl, and 6-quinolyl. Substituent moieties for aryl and heteroaryl ring systems may be selected from the group of acceptable substituent moieties described herein. The term “heteroarylium” refers to a heteroaryl group that is positively charged on one or more of the heteroatoms.

[0030] The term “oxo” as used herein means an oxygen atom that is double bonded to a carbon atom.

[0031] Each of the above terms (e.g., “alkyl,” “heteroalkyl,” “aryl” and “heteroaryl”) are meant to include both substituted and unsubstituted forms of the indicated radical. Non-limiting examples of substituent moieties for each type of radical are provided below.

[0032] Substituent moieties for alkyl, heteroalkyl, alkylene, alkenyl, heteroalkylene, heteroalkenyl, alkynyl, cycloalkyl, heterocycloalkyl, cycloalkenyl, and heterocycloalkenyl groups are, in one embodiment, selected from, deuterium, —OR′, —O, ═NR′, ═N—OR′, —NR′R″, —SR′, halo, —SiR′R″R″, —OC(O)R′, —C(O)R′, —CO₂R′, —CONR′R″, —OC(O)NR′R″, —NR″C(O)R′, —NR′—C(O)NR″R′″, —NR″C(O)₂R′, —NR—C(NR′R″R″)═NR′″, —NR—C(NR′R″)═NR″, —S(O)R′, —S(O)₂R′, —S(O)₂NR′R″, —NRSO₂R′, —NRSO₂NR′R″, —CN and —NO₂ in a number ranging from zero to the number of hydrogen atoms in such radical. In one embodiment, substituent moieties for cycloalkyl, heterocycloalkyl, cycloalkenyl, and heterocycloalkenyl groups also include substituted and unsubstituted alkyl, substituted and unsubstituted alkenyl, and substituted and unsubstituted alkynyl. R′, R″, R′″ and R″″ each in one embodiment independently are hydrogen, substituted or unsubstituted heteroalkyl, substituted or unsubstituted cycloalkyl, substituted or unsubstituted heterocycloalkyl, substituted or unsubstituted aryl (e.g., aryl substituted with 1-3 halogens), substituted or unsubstituted alkyl, alkoxy or thioalkoxy groups, or arylalkyl groups. When a compound provided herein includes more than one R group, for example, each of the R groups is independently selected as are each R′, R″, R″ and R″″ groups when more than one of these groups is present. When R′ and R″ are attached to the same nitrogen atom, they can be combined with the nitrogen atom to form a 4-, 5-, 6-, or 7-membered ring. For example, —NR′R″ is meant to include, but not be limited to, 1-pyrrolidinyl and 4-morpholinyl. From the above discussion of substituent moieties, one of skill in the art will understand that the term “alkyl” is meant to include groups including carbon atoms bound to groups other than hydrogen groups, such as haloalkyl (e.g., —CF₃ and —CH₂CF₃) and acyl (e.g., —C(O) CH₃, —C(O) CF₃, —C(O) CH₂OCH₃, and the like).

[0033] Substituent moieties for aryl and heteroaryl groups are, in one embodiment, selected from deuterium, halo, substituted and unsubstituted alkyl, substituted and unsubstituted alkenyl, and substituted and unsubstituted alkynyl, —OR′, —NR′R″, —SR′, —SiR′R″R′″, —OC(O) R′, —C(O) R′, —CO₂R′, —CONR′R″, —OC(O) NR′R″, —NR″C(O) R′, —NR′—C(O)NR″R′″, —NR″C(O)₂R′, —NR—C(NR′R″R″)═NR′″, —NR—C(NR′R″)═NR″, —S(O)R′, —S(O)₂R′, —S(O)₂NR′R″, —NRSO₂R′, —CN and —NO₂, —R′, —N₃, —CH(Ph)₂, fluoro (C₁-C₄)alkoxy, and fluoro (C₁-C₄)alkyl, in a number ranging from zero to the total number of hydrogens on the aromatic ring system; and where R′, R″, R′″ and R″″ are, in one embodiment, independently selected from hydrogen, substituted or unsubstituted alkyl, substituted or unsubstituted heteroalkyl, substituted or unsubstituted cycloalkyl, substituted or unsubstituted heterocycloalkyl, substituted or unsubstituted aryl and substituted or unsubstituted heteroaryl. When a compound provided herein includes more than one R group, for example, each of the R groups is independently selected as are each R′, R″, R″ and R″″ groups when more than one of these groups is present.

[0034] Two of the substituent moieties on adjacent atoms of an aryl or heteroaryl ring may optionally form a ring of the formula -Q′-C(O)—(CRR′)_{q}-Q″-, wherein Q′ and Q″ are independently —NR—, —O—, —CRR′— or a single bond, and q is an integer of from 0 to 3. Alternatively, two of the substituent moieties on adjacent atoms of the aryl or heteroaryl ring may optionally be replaced with a substituent of the formula -A-(CH₂)ᵣ—B—, wherein A and B are independently —CRR′—, —O—, —NR—, —S—, —S(O)—, —S(O)₂—, —S(O)₂NR′— or a single bond, and r is an integer of from 1 to 4. One of the single bonds of the new ring so formed may optionally be replaced with a double bond. Alternatively, two of the substituent moieties on adjacent atoms of the aryl or heteroaryl ring may optionally be replaced with a substituent of the formula —(CRR′)ₛ—X′—(CR″R′″)_{d}—, where s and d are independently integers of from 0 to 3, and X′ is —O—, —NR′—, —S—, —S(O)—, —S(O)₂—, or —S(O)₂NR′—. The substituent moieties R, R′, R″ and R′″ are, in one embodiment, independently selected from hydrogen, substituted or unsubstituted alkyl, substituted or unsubstituted cycloalkyl, substituted or unsubstituted heterocycloalkyl, substituted or unsubstituted aryl, and substituted or unsubstituted heteroaryl.

[0035] As used herein, the term “heteroatom” or “ring heteroatom” is meant to include oxygen (O), nitrogen (N), sulfur(S), phosphorus (P), and silicon (Si).

[0036] As used herein, a prodrug is a compound that upon in vivo administration is metabolized, or otherwise undergoes chemical changes under physiological conditions, by one or more steps or processes or otherwise converted to a biologically, pharmaceutically or therapeutically active form of the compound. Additionally, prodrugs can be converted to a biologically, pharmaceutically or therapeutically active form of the compound by chemical or biochemical methods in an ex vivo environment. For example, prodrugs can be converted to the compounds of the present invention when placed in a transdermal patch reservoir with a suitable enzyme or chemical reagent.

[0037] Certain compounds provided herein can exist in unsolvated forms as well as solvated forms, including hydrated forms. In general, the solvated forms are equivalent to unsolvated forms and are encompassed within the scope of the present disclosure. Certain compounds provided herein may exist in multiple crystalline or amorphous forms. In general, all physical forms are equivalent for the uses contemplated herein and are intended to be within the scope of the present disclosure.

[0038] Certain compounds provided herein possess asymmetric carbon atoms (optical centers) or double bonds; the racemates, diastereomers, tautomers, geometric isomers and individual isomers are encompassed within the scope of the present disclosure. The compounds provided herein do not include those which are known in the art to be too unstable to synthesize and/or isolate.

[0039] The compounds provided herein may also contain unnatural proportions of atomic isotopes at one or more of the atoms that constitute such compounds. For example, the compounds may be radiolabeled with radioactive isotopes, such as for example tritium (3H), iodine-125 (1251) or carbon-14 (14° C.). All isotopic variations of the compounds provided herein, whether radioactive or not, are encompassed within the scope of the present disclosure.

### II. Antisense Oligonucleotides for Use in Compositions and Methods

[0040] In one embodiment, provided herein are ASOs that are reverse complementary to a portion of exon 53 of human dystrophin pre-mRNA. In one embodiment, the ASOs provided herein have or contain one of the following sequences:

| SEQ ID NO: | Bases (5′ to 3′) |
|---|---|
| 1 | TAAATGCTAGTCTGGAGG |
| 2 | GTAGTAAATGCTAGTCTG |
| 3 | ATATAGTAGTAAATGCTA |
| 4 | TAAATATATAGTAGTAAA |
| 5 | AAAAATAAATATATAGTA |
| 6 | AAAGGAAAAATAAATATA |
| 7 | GAATAAAAGGAAAAATAA |
| 8 | AACTAGAATAAAAGGAAA |
| 9 | CTTTCAACTAGAATAAAA |
| 10 | GAATTCTTTCAACTAGAA |
| 11 | ATTCTGAATTCTTTCAAC |
| 12 | CACTGATTCTGAATTCTT |
| 13 | CATCCCACTGATTCTGAA |
| 14 | TACTTCATCCCACTGATT |
| 15 | TCTTGTACTTCATCCCAC |
| 16 | GGTGTTCTTGTACTTCAT |
| 17 | CTGAAGGTGTTCTTGTAC |
| 18 | CGGTTCTGAAGGTGTTCT |
| 19 | GCCTCCGGTTCTGAAGGT |
| 20 | CTGTTGCCTCCGGTTCTG |
| 21 | TTCAACTGTTGCCTCCGG |
| 22 | TTTCATTCAACTGTTGCC |
| 23 | TAACATTTCATTCAACTG |
| 24 | TCCTTTAACATTTCATTC |
| 25 | TTGAATCCTTTAACATTT |
| 26 | TTGTGTTGAATCCTTTAA |
| 27 | AGCCATTGTGTTGAATCC |
| 28 | CTTCCAGCCATTGTGTTG |
| 29 | CTTAGCTTCCAGCCATTG |
| 30 | TCTTCCTTAGCTTCCAGC |
| 31 | CAGCTTCTTCCTTAGCTT |
| 32 | CTGCTCAGCTTCTTCCTT |
| 33 | AAGACCTGCTCAGCTTCT |
| 34 | GTCCTAAGACCTGCTCAG |
| 35 | GGCCTGTCCTAAGACCTG |
| 36 | GCTCTGGCCTGTCCTAAG |
| 37 | GCTTGGCTCTGGCCTGTC |
| 38 | CTCAAGCTTGGCTCTGGC |
| 39 | CATGACTCAAGCTTGGCT |
| 40 | CCTTCCATGACTCAAGCT |
| 41 | ACCCTCCTTCCATGACTC |
| 42 | TAGGGACCCTCCTTCCAT |
| 43 | CTGTATAGGGACCCTCCT |
| 44 | ATCTACTGTATAGGGACC |
| 45 | ATTGCATCTACTGTATAG |
| 46 | TTTGGATTGCATCTACTG |
| 47 | TTTCTTTTGGATTGCATC |
| 48 | GTGATTTTCTTTTGGATT |
| 49 | TTTCTGTGATTTTCTTTT |
| 50 | CTTGGTTTCTGTGATTTT |
| 51 | CTAACCTTGGTTTCTGTG |
| 52 | TGATACTAACCTTGGTTT |
| 53 | ATCTTTGATACTAACCTT |
| 54 | AAGGTATCTTTGATACTA |
| 55 | TTAAAAAGGTATCTTTGA |
| 56 | TTATTTTAAAAAGGTATC |
| 57 | GTATTTTATTTTAAAAAG |
| 58 | AACCAGTATTTTATTTTA |
| 59 | AATGTAACCAGTATTTTA |
| 60 | TATCAAATGTAACCAGTA |
| 61 | TGATTCTGAATTCTTTCA |
| 62 | CTGATTCTGAATTCTTTC |
| 63 | ACTGATTCTGAATTCTTT |
| 64 | CCACTGATTCTGAATTCT |
| 65 | CCCACTGATTCTGAATTC |
| 66 | TCCCACTGATTCTGAATT |
| 67 | ATCCCACTGATTCTGAAT |
| 68 | TCATCCCACTGATTCTGA |
| 69 | TTCATCCCACTGATTCTG |
| 70 | CTTCATCCCACTGATTCT |
| 71 | ACTTCATCCCACTGATTC |
| 72 | GTACTTCATCCCACTGAT |
| 73 | TGTACTTCATCCCACTGA |
| 74 | TTGTACTTCATCCCACTG |
| 75 | CTTGTACTTCATCCCACT |
| 76 | TTCTTGTACTTCATCCCA |
| 77 | GTTCTTGTACTTCATCCC |
| 78 | TGTTCTTGTACTTCATCC |
| 79 | GTGTTCTTGTACTTCATC |
| 80 | AGGTGTTCTTGTACTTCA |
| 81 | AAGGTGTTCTTGTACTTC |
| 82 | GAAGGTGTTCTTGTACTT |
| 83 | TGAAGGTGTTCTTGTACT |
| 84 | TCTGAAGGTGTTCTTGTA |
| 85 | TTCTGAAGGTGTTCTTGT |
| 86 | GTTCTGAAGGTGTTCTTG |
| 87 | GGTTCTGAAGGTGTTCTT |
| 88 | CCGGTTCTGAAGGTGTTC |
| 89 | TCCGGTTCTGAAGGTGTT |
| 90 | CTCCGGTTCTGAAGGTGT |
| 91 | CCTCCGGTTCTGAAGGTG |
| 92 | TGCCTCCGGTTCTGAAGG |
| 93 | TTGCCTCCGGTTCTGAAG |
| 94 | GTTGCCTCCGGTTCTGAA |
| 95 | TGTTGCCTCCGGTTCTGA |
| 96 | ACTGTTGCCTCCGGTTCT |
| 97 | AACTGTTGCCTCCGGTTC |
| 98 | CAACTGTTGCCTCCGGTT |
| 99 | TCAACTGTTGCCTCCGGT |
| 100 | ATTCAACTGTTGCCTCCG |
| 101 | CATTCAACTGTTGCCTCC |
| 102 | TCATTCAACTGTTGCCTC |
| 103 | TTCATTCAACTGTTGCCT |
| 104 | ATTTCATTCAACTGTTGC |
| 105 | CATTTCATTCAACTGTTG |
| 106 | ACATTTCATTCAACTGTT |
| 107 | GGTGTTCTTGTACT |
| 108 | TTCTTGTACTTCAT |
| 109 | TGTTCTTGTACTTC |
| 110 | GGTGTTCTTGTACTTC |
| 111 | TGTTCTTGTACTTCAT |
| 112 | GTGTTCTTGTACTTCA |
| 113 | GGTGTTCTTGTACTTCATCC |
| 114 | AAGGTGTTCTTGTACTTCAT |
| 115 | AGGTGTTCTTGTACTTCATC |
| 116 | AACATTTCATTCAACTGT |
| 117 | TTAACATTTCATTCAACT |
| 118 | TTTAACATTTCATTCAAC |
| 119 | CTTTAACATTTCATTCAA |
| 120 | CCTTTAACATTTCATTCA |
| 121 | ATTGTGTTGAATCCTTTA |
| 122 | CATTGTGTTGAATCCTTT |
| 123 | CCATTGTGTTGAATCCTT |
| 124 | GCCATTGTGTTGAATCCT |
| 125 | CAGCCATTGTGTTGAATC |
| 126 | CCAGCCATTGTGTTGAAT |
| 127 | TCCAGCCATTGTGTTGAA |
| 128 | TTCCAGCCATTGTGTTGA |
| 129 | GCTTCCAGCCATTGTGTT |
| 130 | AGCTTCCAGCCATTGTGT |
| 131 | TAGCTTCCAGCCATTGTG |
| 132 | TTAGCTTCCAGCCATTGT |
| 133 | CCTTAGCTTCCAGCCATT |
| 134 | TCCTTAGCTTCCAGCCAT |
| 135 | TTCCTTAGCTTCCAGCCA |
| 136 | CTTCCTTAGCTTCCAGCC |
| 137 | TTCTTCCTTAGCTTCCAG |
| 138 | CTTCTTCCTTAGCTTCCA |
| 139 | GCTTCTTCCTTAGCTTCC |
| 140 | AGCTTCTTCCTTAGCTTC |
| 141 | GTTTCTGTGATTTTCTTT |
| 142 | GGTTTCTGTGATTTTCTT |
| 143 | TGGTTTCTGTGATTTTCT |
| 144 | TTGGTTTCTGTGATTTTC |
| 145 | CCTTGGTTTCTGTGATTT |
| 146 | ACCTTGGTTTCTGTGATT |
| 147 | AACCTTGGTTTCTGTGAT |
| 148 | TAACCTTGGTTTCTGTGA |
| 149 | TTGATACTAACCTTGGTT |
| 150 | TTTGATACTAACCTTGGT |
| 151 | CTTTGATACTAACCTTGG |
| 152 | TCTTTGATACTAACCTTG |
| 153 | TATCTTTGATACTAACCT |
| 154 | GTATCTTTGATACTAACC |
| 155 | GGTATCTTTGATACTAAC |
| 156 | AGGTATCTTTGATACTAA |
| 157 | CCATGACTCAAGCTTGGC |
| 158 | TCCATGACTCAAGCTTGG |
| 159 | TTCCATGACTCAAGCTTG |
| 160 | CTTCCATGACTCAAGCTT |
| 161 | TCCTTCCATGACTCAAGC |
| 162 | CTCCTTCCATGACTCAAG |
| 163 | CCTCCTTCCATGACTCAA |
| 164 | CCCTCCTTCCATGACTCA |
| 165 | GACCCTCCTTCCATGACT |
| 166 | GGACCCTCCTTCCATGAC |
| 167 | GGGACCCTCCTTCCATGA |
| 168 | AGGGACCCTCCTTCCATG |
| 169 | TGTACTTCATCCCA |
| 170 | TTGTACTTCATCCC |
| 171 | CTTGTACTTCATCC |
| 172 | TCTTGTACTTCATC |
| 173 | GTTCTTGTACTTCA |
| 174 | GTGTTCTTGTACTT |
| 175 | AGGTGTTCTTGTAC |
| 176 | AAGGTGTTCTTGTA |
| 177 | TTGTACTTCATCCCA |
| 178 | CTTGTACTTCATCCC |
| 179 | TCTTGTACTTCATCC |
| 180 | TTCTTGTACTTCATC |
| 181 | GTTCTTGTACTTCAT |
| 182 | TGTTCTTGTACTTCA |
| 183 | GTGTTCTTGTACTTC |
| 184 | GGTGTTCTTGTACTT |
| 185 | AGGTGTTCTTGTACT |
| 186 | AAGGTGTTCTTGTAC |
| 187 | CTTGTACTTCATCCCA |
| 188 | TCTTGTACTTCATCCC |
| 189 | TTCTTGTACTTCATCC |
| 190 | GTTCTTGTACTTCATC |
| 191 | AGGTGTTCTTGTACTT |
| 192 | AAGGTGTTCTTGTACT |
| 193 | TCTTGTACTTCATCCCA |
| 194 | TTCTTGTACTTCATCCC |
| 195 | GTTCTTGTACTTCATCC |
| 196 | TGTTCTTGTACTTCATC |
| 197 | GTGTTCTTGTACTTCAT |
| 198 | GGTGTTCTTGTACTTCA |
| 199 | AGGTGTTCTTGTACTTC |
| 200 | AAGGTGTTCTTGTACTT |
| 201 | GTTCTTGTACTTCATCCCA |
| 202 | TGTTCTTGTACTTCATCCC |
| 203 | GTGTTCTTGTACTTCATCC |
| 204 | GGTGTTCTTGTACTTCATC |
| 205 | AGGTGTTCTTGTACTTCAT |
| 206 | AAGGTGTTCTTGTACTTCA |
| 207 | TGTTCTTGTACTTCATCCCA |
| 208 | GTGTTCTTGTACTTCATCCC |
| 209 | AGCCATTGTGTTGAATCCTGTTCTTGTACTTCATCC |
| 210 | TGTTCTTGTACTTCATCCAGCCATTGTGTTGAATCC |
| 211 | CCATTGTGTTGAATCCGTTCTTGTACTTCATC |
| 212 | GTTCTTGTACTTCATCCCATTGTGTTGAATCC |
| 213 | ATTGTGTTGAATCCGTTCTTGTACTTCA |
| 214 | GTTCTTGTACTTCAATTGTGTTGAATCC |
| 215 | TCTTGTACTTCATGTGTTGAATCC |
| 216 | TCTTGTACTTCATTGTGTTGAATC |
| 217 | TCTTGTACTTCAATTCAACACAAT |
| 218 | TTCTTGTACTTCTGTGTTGAATCC |
| 219 | TTCTTGTACTTCTTGTGTTGAATC |
| 220 | TTCTTGTACTTCATTCAACACAAT |
| 221 | GTTCTTGTACTTTGTGTTGAATCC |
| 222 | GTTCTTGTACTTTTGTGTTGAATC |
| 223 | GTTCTTGTACTTATTCAACACAAT |
| 224 | TGTGTTGAATCCTCTTGTACTTCA |
| 225 | TGTGTTGAATCCTTCTTGTACTTC |
| 226 | TGTGTTGAATCCGTTCTTGTACTT |
| 227 | TTGTGTTGAATCTCTTGTACTTCA |
| 228 | TTGTGTTGAATCTTCTTGTACTTC |
| 229 | TTGTGTTGAATCGTTCTTGTACTT |
| 230 | ATTCAACACAATTCTTGTACTTCA |
| 231 | TGTTCTUGTACTTCATCC |
| 232 | TGTTCTUGUACUUCATCC |
| 233 | TCATCCCACTGATT |
| 234 | TCATCCCACTGATTCT |
| 235 | TCATCCCACTGATTCTGAAT |
| 236 | TCATCCCACTGATTCTGAATTC |
| 237 | CCCACTGATTCTGA |
| 238 | ATCCCACTGATTCTGA |
| 239 | CTTCATCCCACTGATTCTGA |
| 240 | TACTTCATCCCACTGATTCTGA |
| 241 | ATCCCACTGATTCT |
| 242 | CATCCCACTGATTCTG |
| 243 | TTCATCCCACTGATTCTGAA |
| 244 | CTTCATCCCACTGATTCTGAAT |
| 245 | TCTTTCAACTAGAATAAA |
| 246 | TTCTTTCAACTAGAATAA |
| 247 | ATTCTTTCAACTAGAATA |
| 248 | AATTCTTTCAACTAGAAT |
| 249 | TGAATTCTTTCAACTAGA |
| 250 | CTGAATTCTTTCAACTAG |
| 251 | TCTGAATTCTTTCAACTA |
| 252 | TTCTGAATTCTTTCAACT |
| 253 | GATTCTGAATTCTTTCAA |
| 254 | TCAUCCCACUGAUUCUGA |
| 255 | UUCUUGUACUUCAUCCCA |
| 256 | GUUCUUGUACUUCAUCCC |
| 257 | UGUUCUUGUACUUCAUCC |
| 258 | TGUUCUUGUACUUCAUCC |
| 259 | GUGUUCUUGUACUUCAUC |
| 260 | GTGUUCUUGUACUUCATC |
| 261 | GGUGUUCUUGUACUUCAU |
| 262 | AGGUGUUCUUGUACUUCA |
| 263 | AGCCAUUGUGUUGAAUCC |
| 264 | TGTUCUUGUACUUCATCC |
| 265 | AATTCTTTCAACTAG |
| 266 | TCTGAATTCTTTCAAC |
| 267 | TCTGAATTCTTTCAA |
| 268 | CTGAATTCTTTCAAC |
| 269 | TGAATTCTTTCAACT |
| 270 | ATTCTTTCAACTAGA |
| 271 | TCTGAATTCTTTCAACT |
| 272 | CTGAATTCTTTCAACTA |
| 273 | TGAATTCTTTCAACTAG |
| 274 | GAATTCTTTCAACTAGA |
| 275 | TCTGAATTCTTTCAACTAGA |
| 276 | TCTGAATTCTTTCAACTAG |
| 277 | CTGAATTCTTTCAACTAGA |
| 278 | CTGAATTCTTTCAACTAGAA |
| 279 | TTCTGAATTCTTTCAACTAG |
| 280 | TGTUCUUGUACUUCAUCC |
| 281 | TGUTCUUGUACUUCAUCC |
| 282 | TGUUCTUGUACUUCAUCC |
| 283 | TGUUCUTGUACUUCAUCC |
| 284 | TGUUCUUGTACUUCAUCC |
| 285 | TGUUCUUGUACTUCAUCC |
| 286 | TGUUCUUGUACUTCAUCC |
| 287 | TGUUCUUGUACUUCATCC |
| 288 | TGTTCUUGUACUUCATCC |
| 289 | TGTTCTUGUACUTCATCC |
| 290 | TGTTCTTGUACTTCATCC |
| 291 | UGUUCUUGTACUUCAUCC |
| 292 | GGTGTTCTTGUACTTC |
| 293 | TGTTCTTGUACTTCAT |
| 294 | TCUGAAUUCUUUCAACUAGA |
| 295 | CTGAATTCTTTCAACT |
| 296 | TGAATTCTTTCAACTA |
| 297 | GAATTCTTTCAACTAG |
| 298 | AATTCTTTCAACTAGA |
| 299 | CUGAAUUCUUUCAACUAG |
| 300 | CTGAAUUCUUUCAACUAG |
| 301 | UCUGAAUUCUUUCAACUAGA |
| 302 | CUGAATTCTTTCAACTAG |
| 303 | CTGAATTCTUUCAACTAG |
| 304 | CUGAATTCTUUCAACTAG |
| 305 | CUGAAUUCUUUCAACTAG |
| 306 | CTGAAUUCTTTCAACTAG |
| 307 | CTGAATUCTTTCAACTAG |
| 308 | AATTCTTTCAACUAG |
| 309 | AAUUCUUUCAACUAG |
| 310 | AATUCUUUCAACUAG |
| 311 | AAUUCUUUCAACTAG |
| 312 | CUGAATTCTTTCAACUAG |
| 313 | CUGAAUTCTTTCAACUAG |
| 314 | CUGAAUUCTTTCAACUAG |
| 315 | CUGAAUUCTTUCAACUAG |
| 316 | CTGAATUCUTUCAACTAG |
| 317 | CUGAAUTCTUTCAACUAG |
| 318 | CUGAAUTCUUTCAACTAG |
| 319 | CUGAATUCUTTCAACTAG |
| 320 | CTGAATTCUUTCAACTAG |
| 321 | CTGAATTCUUUCAACTAG |
| 322 | CTGAATUCUUUCAACTAG |
| 323 | CTGAAUUCUUUCAACTAG |
| 324 | ATTCTGAATTCTTTCAACT |
| 325 | GATTCTGAATTCTTTCAACT |
| 326 | TGATTCTGAATTCTTTCAACT |
| 327 | CTGATTCTGAATTCTTTCAACT |
| 328 | GATTCTGAATTCTTTCAAC |
| 329 | TGATTCTGAATTCTTTCAAC |
| 330 | CTGATTCTGAATTCTTTCAAC |
| 331 | ACTGATTCTGAATTCTTTCAAC |

[0041] In another embodiment, the ASOs provided herein have or contain one of the sequences provided herein where all nucleotides are RNA. In another embodiment, the ASOs provided herein have or contain one of the sequences provided herein where all nucleotides are DNA. In another embodiment, the ASOs provided herein have or contain one of the sequences provided herein where the nucleotides are a mixture of RNA and DNA.

[0042] As is known to those of skill in the art, naturally occurring oligonucleotides usually contain nucleotides, which contain a sugar moiety and a base moiety, which are linked by a phosphodiester backbone. In one embodiment, the ASOs provided herein contain a modification. The modification is a chemical modification of either the sugar moiety or the base moiety of one or more nucleotides in the ASO or is a chemical modification of the phosphodiester backbone. Each modification may be independently selected. Thus, an ASO provided herein may have two or more distinct modifications.

[0043] In one embodiment, the modification is a chemical modification of the sugar moiety of one or more nucleotides in the ASO. In another embodiment, the modification is a chemical modification of the sugar moiety of 1, 2, 3, 4 or all nucleotides in the ASO.

[0044] In one embodiment, the modified sugar moiety for use in the ASOs provided herein is a 2′-O-modified RNA such as 2′-O-alkyl or 2′-O-(substituted)alkyl, e.g. 2′-O-methyl, 2′-O-(2-cyanoethyl), 2′-O-(2-methoxy)ethyl (2′-MOE), 2′-O-(2-thiomethyl)ethyl, 2′-O-butyryl, 2′-O-propargyl, 2′-O-acetalester (such as e.g. Biscans et al. Bioorg. Med. Chem. 2015, 23, 5360), 2′-O-allyl, 2′-O-(2S-methoxypropyl), 2′-O—(N-(aminocthyl) carbamoyl)methyl) (2′-AECM), 2′-O-(2-carboxyethyl) and carbamoyl derivatives (Yamada et al. Org. Biomol. Chem. 2014, 12, 6457), 2′-O-(2-amino) propyl, 2′-O-(2-(dimethylamino) propyl), 2′-O-(2-amino)ethyl, 2′-O-(2-(dimethylamino)ethyl), 2′-O-(haloalkoxy)methyl (Arai K. et al. Bioorg. Med. Chem. 2011, 21, 6285), e.g. 2′-O-(2-chloroethoxy)methyl (MCEM), 2′-O-(2,2-dichloroethoxy)methyl (DCEM); 2′-O-alkoxycarbonyl e.g. 2′-O-[2-(methoxycarbonyl)ethyl](MOCE), 2′-O-[2-(N-methylcarbamoyl)ethyl] (MCE), 2′-O-[2-(N,N-dimethylcarbamoyl)ethyl] (DCME), 2′-O-[2-(methylthio)ethyl] (2′-MTE), 2′-(@—O-scrinol); 2′-halo e.g. 2′-F, FANA (2′-F arabinosyl nucleic acid); 2′,4′-difluoro-2′-deoxy; carbasugar and azasugar modifications; 3′—O-substituted e.g. 3′—O-methyl, 3′—O-butyryl, 3′—O-propargyl; 4′-substituted e.g. 4′-aminomethyl-2′-O-methyl or 4′-aminomethyl-2′-fluoro; 5′-substituted e.g. 5′-methyl or CNA (Ostergaard et al. ACS Chem. Biol. 2014, 22, 6227); and their derivatives.

[0045] In one embodiment, the 2′-substituted RNA is 2′-F, 2′-O-methyl, or 2′-O-(2-methoxyethyl) (i.e., 2′-MOE). In another embodiment, the 2′-substituted RNA is a 2′-MOE.

[0046] In one embodiment, the modified sugar moiety for use in the ASOs provided herein is a modification that increases binding affinity to target strands, and/or increases melting temperature of the resulting duplex of said first and/or second oligonucleotide with its target, and/or decreases immunostimulatory effects, and/or increases biostability, and/or improves biodistribution and/or intra-tissue distribution, and/or improves cellular uptake and trafficking.

[0047] In one embodiment, the modified sugar moiety for use in the ASOs provided herein is a bicyclic nucleic acid (BNA) monomer. A BNA is, in one embodiment, a pentose-derived moiety that has been chemically altered to conformationally restrict the pentose ring. Non-limiting examples of BNAs for use in the ASOs provided herein are those where a first cycle such as a pentose ring forms a spirane with a further cyclic moiety so that both cycles share only one atom, BNAs where a first cycle such as a pentose cycle is fused to a further cyclic moiety so that both cycles share two adjacent atoms, and BNAs where a first cycle such as a pentose cycle forms a bridged compound through a moiety that is linked to the first cyclic moiety at two non-adjacent atoms. Such non-adjacent atoms are referred to as bridgehead atoms. Bridged compounds comprise multiple cycles, each of which overlap over at least three atoms. A compound with two cycles wherein those cycles overlap over only two atoms is a fused compound instead. In some bridged compounds, the smallest link between two bridgehead atoms is referred to as the bridging moiety, or as the bridge moiety. In other bridged compounds, when one cycle is a characteristic cycle such as the pentose cycle of a nucleotide, the moiety that is not constitutive to that characteristic cycle is referred to as the bridging moiety. It follows that the nomenclature of bridged bicyclic compounds is context dependent.

[chemical structure]

[0048] Bicyclic compounds can comprise additional cycles. A bicyclic compound contains at least two cycles, and said two cycles constitute a spirane, a fused system, or a bridged system, or a combination thereof. In one embodiment, bicyclic compounds are fused and bridged compounds. In some embodiments, a BNA is a bridged nucleic acid monomer.

[0049] In one embodiment, provided is an ASO wherein each occurrence of the BNA in the ASO is independently chosen from the group consisting of a conformationally restricted nucleotide (CRN) monomer, a locked nucleic acid (LNA) monomer, a xylo-LNA monomer, an α-LNA monomer, an α-L-LNA monomer, a β-D-LNA monomer, a 2′-amino-LNA monomer, a 2′-(alkylamino)-LNA monomer, a 2′-(acylamino)-LNA monomer, a 2′-N-substituted-2′-amino-LNA monomer, a 2′-thio-LNA monomer, a (2′-O,4′-C) constrained ethyl (cEt) BNA monomer, a (2′-O,4′-C) constrained methoxyethyl (cMOE) BNA monomer, a 2′,4′-BNANC (N—H) monomer, a 2′,4′-BNANC (N-Mc) monomer, a 2′,4′-BNANC (N-Bn) monomer, an ethylene-bridged nucleic acid (ENA) monomer, a carba LNA (cLNA) monomer, a 3,4-dihydro-2H-pyran nucleic acid (DpNA) monomer, a 2′-C-bridged bicyclic nucleotide (CBBN) monomer, a heterocyclic-bridged BNA monomer, an amido-bridged BNA monomer, an urea-bridged BNA monomer, a sulfonamide-bridged BNA monomer, a bicyclic carbocyclic nucleotide monomer, a TriNA monomer, an α-L-TriNA monomer, a bicyclo DNA (bcDNA) monomer, an F-bcDNA monomer, a tricyclo DNA (tcDNA) monomer, an F-tcDNA monomer, an oxetane nucleotide monomer, a locked PMO monomer derived from 2′-amino-LNA, and derivatives thereof. In one embodiment, more than one distinct scaffold BNA modification can be used in said oligonucleotide. In some embodiments, each occurrence of the BNA is independently chosen from the group consisting of a conformationally restrained nucleotide (CRN) monomer, a locked nucleic acid (LNA) monomer, a xylo-LNA monomer, an α-L-LNA monomer, a β-D-LNA monomer, a 2′-amino-LNA monomer, a 2′-(alkylamino)-LNA monomer, a 2′-(acylamino)-LNA monomer, a 2′-N-substituted-2′-amino-LNA monomer, a (2′-O,4′-C) constrained ethyl (cEt) LNA monomer, a (2′-O,4′-C) constrained methoxyethyl (cMOE) BNA monomer, a 2′,4′-BNANC (N—H) monomer, a 2′,4′-BNANC (N-Me) monomer, an ethylene-bridged nucleic acid (ENA) monomer, a 2′-C-bridged bicyclic nucleotide (CBBN) monomer, and derivatives thereof.

[0050] In one embodiment, each occurrence of the BNA is a locked nucleic acid (LNA) monomer. In another embodiment, the ASOs provided herein contain LNA and 2′-MOE monomers. In another embodiment, the ASOs provided herein contain 1-4 LNA monomers. In another embodiment, the ASOs provided herein contain 1-3 LNA monomers. In another embodiment, the ASOs provided herein contain 1 or 2 LNA monomers. In another embodiment, the ASOs provided herein contain 1, 2, 3 or 4 LNA monomers. In another embodiment, the ASOs provided herein contain one LNA monomer. In another embodiment, the ASOs provided herein contain two LNA monomers. In another embodiment, the ASOs provided herein contain three LNA monomers. In another embodiment, the ASOs provided herein contain four LNA monomers. In another embodiment, the ASOs provided herein contain two LNA monomers at the two 5′ terminal nucleotide positions of the ASO and two LNA monomers at the two 3′ terminal nucleotide positions of the ASO.

[0051] Structural examples of these BNAs are shown below, where B is a nucleotide base (e.g., A, G, T, C, 5-methylcytosine, etc.), X is a variable and represents O, S or NR, where R is H or alkyl, X₂ is a hydroxyl moiety or another 2′-substitution as defined herein, and L is a backbone linkage as described herein. As known to those of skill in the art, the naming of such modifications in the literature is often arbitrary and does not follow a uniform convention—in this application, the names as provided below are intended to refer to the structures provided below. For comparison, the cyclic scaffold of a conventional RNA monomer is shown first. In the structures shown below, monomers are typically depicted as 3′-terminal monomers. When chirality is not indicated, each enantiomer is individually referenced. Heteroatoms comprised in a cyclic moiety can be replaced with other heteroatoms, e.g., N, O or S.

[chemical structure]

[chemical structure]

[0052] In another embodiment, BNAs for use herein include cEt (2′-O,4′-C constrained ethyl) LNA (doi: 10.1021/ja710342q), cMOE (2′-O,4′-C constrained methoxyethyl) LNA (Seth et al., J. Org. Chem. 2010, 75, 1569-1581), 2′,4′-BNANC (N—H), 2′,4′-BNANC (N-Me), ethylene-bridged nucleic acid (ENA) (doi: 10.1093/nass/1.1.241), carba LNA (cLNA) (doi: 10.1021/jo100170g), DpNA (Osawa et al., J. Org. Chem., 2015, 80 (21), pp 10474-10481), 2′-C-bridged bicyclic nucleotide (CBBN, as in e.g. WO 2014/145356 (MiRagen Therapeutics)), heterocyclic-bridged LNA (as in e.g. WO 2014/126229 (Mitsuoka Y et al.)), amido-bridged LNA (as in e.g. Yamamoto et al. Org. Biomol. Chem. 2015, 13, 3757), urea-bridged LNA (as in e.g. Nishida et al. Chem. Commun. 2010, 46, 5283), sulfonamide-bridged LNA (as in e.g. WO 2014/112463 (Obika S et al.)), bicyclic carbocyclic nucleosides (as in e.g. WO 2015/142910 (Ionis Pharmaceuticals)), TriNA (Hanessian et al., J. Org. Chem., 2013, 78 (18), pp 9064-9075), α-L-TriNA, bicyclo DNA (bcDNA) (Bolli et al., Chem Biol. 1996 March; 3 (3): 197-206), F-bcDNA (DOI: 10.1021/jo402690j), tricyclo DNA (tcDNA) (Murray et al., Nucl. Acids Res., 2012, Vol. 40, No. 13 6135-6143), F-tcDNA (doi: 10.1021/acs.joc.5b00184), or an oxetane nucleotide monomer (Nucleic Acids Res. 2004, 32, 5791-5799). In other embodiments, BNAs for use herein include those disclosed in WO 2011/097641 (ISIS/Ionis Pharmaceuticals) and WO 2016/017422 (Osaka University).

[0053] In another embodiment, the chemical modification of the sugar moiety of one or more nucleotides in the ASOs provided herein involves replacement of the sugar with another chemical moiety. In these embodiments, the sugar moiety is replaced with, e.g., a morpholine (PMO, PPMO, PMO-X), a peptide derivative (PNA), boron-cluster modified PNA, pyrrolidine-based oxy-peptide nucleic acid (POPNA), glycol- or glycerol-based nucleic acid (GNA), threose-based nucleic acid (TNA), acyclic threoninol-based nucleic acid (aTNA), cationic morpholino-based oligomers (PMOPlus), oligonucleotides with integrated bases and backbones (ONIBs), pyrrolidine-amide oligonucleotides (POMs); and their derivatives.

[0054] In one embodiment, the modification is a chemical modification of the base moiety of one or more nucleotides in the ASO. In another embodiment, the modification is a chemical modification of the base moiety of 1, 2, 3, 4 or all nucleotides in the ASO.

[0055] In one embodiment, the ASOs provided herein contain at least one modified base moiety. In another embodiment, the ASOs provided herein have all base moieties modified.

[0056] In another embodiment, the ASOs provided herein have or contain one of the sequences provided herein where at least one thymine base is a uracil. In another embodiment, the ASOs provided herein have or contain one of the sequences provided herein where all thymine bases are uracils. In another embodiment, the ASOs provided herein have or contain one of the sequences provided herein where at least one cytosine base is 5-methylcytosine. In another embodiment, the ASOs provided herein have or contain one of the sequences provided herein where all cytosine bases are 5-methylcytosine. In another embodiment, the ASOs provided herein have or contain one of the sequences provided herein where all thymine bases are uracils and all cytosine bases are 5-methylcytosine.

[0057] In one embodiment, the modification is a chemical modification of the backbone of the ASO. In another embodiment, the modification is a chemical modification of the backbone of the ASO where 1, 2, 3, 4 or all phosphodiester linkages in the ASO are modified. In another embodiment, the ASO provided herein has at least one phosphorothioate backbone linkage. In another embodiment, the ASO provided herein has a fully phosphorothioate backbone linkage. In another embodiment, the ASO provided herein has a mixture of phosphorothioate and phosphate backbone linkages. In another embodiment, the ASO provided herein has at least one phosphorodiamidate backbone linkage. In another embodiment, the ASO provided herein has a fully phosphorodiamidate backbone linkage. In another embodiment, the ASO provided herein has a mixture of phosphorodiamidate and phosphate backbone linkages.

[0058] In another embodiment, the backbone in the ASOs provided herein is a chirally pure phosphorothioate, phosphorodithioate (PS2), phosphonoacetate (PACE), phosphonoacetamide (PACA), thiophosphonoacetate, thiophosphonoacetamide, phosphorothioate prodrug, H-phosphonate, methyl phosphonate, methyl phosphonothioate, methyl phosphate, methyl phosphorothioate, ethyl phosphate, ethyl phosphorothioate, boranophosphate, boranophosphorothioate, methyl boranophosphate, methyl boranophosphorothioate, methyl boranophosphonate, methyl boranophosphonothioate, and their derivatives. Another modification includes phosphoramidite, phosphoramidate, N3′→P5′ phosphoramidate, phosphordiamidate, phosphorothiodiamidate, sulfamate, dimethylenesulfoxide, sulfonate, triazole, oxalyl, carbamate, methyleneimino (MMI), 3′-S-phosphorothiolate and thioacetamido nucleic acid (TANA); and their derivatives.

[0059] In one embodiment, the ASOs provided herein contain a hydroxyalkoxy group. Hydroxyalkoxy groups for use in the ASOs provided herein comprises or consists of an ethylene glycol monomer, ethylene glycol oligomer or ethylene glycol polymer (also known as polyethylene glycol, PEG).

[0060] In another embodiment, the antisense oligonucleotide for use in the compositions and methods provided herein is selected from the table below. The table uses standard hierarchical editing language for macromolecules (HELM) well known to those of skill in the art. Briefly, HELM is a method of describing complex biological molecules. It is a notation that is machine readable to render the composition and structure of peptides, proteins, oligonucleotides, and related small molecule linkers. See, e.g., Zhang, et al. J. Chem. Inf. Model. 2012, 52, 10, 2796-2806, pubs.acs.org/doi/10.1021/ci3001925; www.pistoiaalliance.org/helm-notation/.

| SEQ ID NO: | Bases (5′ to 3′) |
|---|---|
| 332 | RNA1{[moe](T)[sp].[moe](A)[sp].[moe](A)[sp].[moe](A)[sp].[moe](T)[s |
| | p].[moe](G)[sp].[moe]([m5C])[sp].[moe](T)[sp].[moe](A)[sp].[moe](G)[s |
| | p].[moe](T)[sp].[moe]([m5C])[sp].[moe](T)[sp].[moe](G)[sp].[moe](G)[sp |
| | ].[moe](A)[sp].[moe](G)[sp].[moe](G)}$$$$V2.0 |
| 333 | RNA1{[moe](G)[sp].[moe](T)[sp].[moe](A)[sp].[moe](G)[sp].[moe](T)[s |
| | p].[moe](A)[sp].[moe](A)[sp].[moe](A)[sp].[moe](T)[sp].[moe](G)[sp].[m |
| | oe]([m5C])[sp].[moe](T)[sp].[moe](A)[sp].[moe](G)[sp].[moe](T)[sp].[mo |
| | e]([m5C])[sp].[moe](T)[sp].[moe](G)}$$$$V2.0 |
| 334 | RNA1{[moe](A)[sp].[moe](T)[sp].[moe](A)[sp].[moe](T)[sp].[moe](A)[s |
| | p].[moe](G)[sp].[moe](T)[sp].[moe](A)[sp].[moe](G)[sp].[moe](T)[sp].[m |
| | oe](A)[sp].[moe](A)[sp].[moe](A)[sp].[moe](T)[sp].[moe](G)[sp].[moe]([ |
| | m5C])[sp].[moe](T)[sp].[moe](A)}$$$$V2.0 |
| 335 | RNA1{[moe](T)[sp].[moe](A)[sp].[moe](A)[sp].[moe](A)[sp].[moe](T)[s |
| | p].[moe](A)[sp].[moe](T)[sp].[moe](A)[sp].[moe](T)[sp].[moe](A)[sp].[m |
| | oe](G)[sp].[moe](T)[sp].[moe](A)[sp].[moe](G)[sp].[moe](T)[sp].[moe](A |
| | )[sp].[moe](A)[sp].[moe](A)}$$$$V2.0 |
| 336 | RNA1{[moe](A)[sp].[moe](A)[sp].[moe](A)[sp].[moe](A)[sp].[moe](A)[s |
| | p].[moe](T)[sp].[moe](A)[sp].[moe](A)[sp].[moe](A)[sp].[moe](T)[sp].[m |
| | oe](A)[sp].[moe](T)[sp].[moe](A)[sp].[moe](T)[sp].[moe](A)[sp].[moe](G |
| | )[sp].[moe](T)[sp].[moe](A)}$$$$V2.0 |
| 337 | RNA1{[moe](A)[sp].[moe](A)[sp].[moe](A)[sp].[moe](G)[sp].[moe](G)[s |
| | p].[moe](A)[sp].[moe](A)[sp].[moe](A)[sp].[moe](A)[sp].[moe](A)[sp].[m |
| | oe](T)[sp].[moe](A)[sp].[moe](A)[sp].[moe](A)[sp].[moe](T)[sp].[moe](A |
| | )[sp].[moe](T)[sp].[moe](A)}$$$$V2.0 |
| 338 | RNA1{[moe](G)[sp].[moe](A)[sp].[moe](A)[sp].[moe](T)[sp].[moe](A)[s |
| | p].[moe](A)[sp].[moe](A)[sp].[moe](A)[sp].[moe](G)[sp].[moe](G)[sp].[m |
| | oe](A)[sp].[moe](A)[sp].[moe](A)[sp].[moe](A)[sp].[moe](A)[sp].[moe]( |
| | T)[sp].[moe](A)[sp].[moe](A)}$$$$V2.0 |
| 339 | RNA1{[moe](A)[sp].[moe](A)[sp].[moe]([m5C])[sp].[moe](T)[sp].[moe]( |
| | A)[sp].[moe](G)[sp].[moe](A)[sp].[moe](A)[sp].[moe](T)[sp].[moe](A)[sp |
| | ].[moe](A)[sp].[moe](A)[sp].[moe](A)[sp].[moe](G)[sp].[moe](G)[sp].[mo |
| | e](A)[sp].[moe](A)[sp].[moe](A)}$$$$V2.0 |
| 340 | RNA1{[moe]([m5C])[sp].[moe](T)[sp].[moe](T)[sp].[moe](T)[sp].[moe]([ |
| | m5C])[sp].[moe](A)[sp].[moe](A)[sp].[moe]([m5C])[sp].[moe](T)[sp].[m |
| | oe](A)[sp].[moe](G)[sp].[moe](A)[sp].[moe](A)[sp].[moe](T)[sp].[moe]( |
| | A)[sp].[moe](A)[sp].[moe](A)[sp].[moe](A)}$$$$V2.0 |
| 341 | RNA1{[moe](G)[sp].[moe](A)[sp].[moe](A)[sp].[moe](T)[sp].[moe](T)[s |
| | p].[moe]([m5C])[sp].[moe](T)[sp].[moe](T)[sp].[moe](T)[sp].[moe]([m5C |
| | ])[sp].[moe](A)[sp].[moe](A)[sp].[moe]([m5C])[sp].[moe](T)[sp].[moe](A |
| | )[sp].[moe](G)[sp].[moe](A)[sp].[moe](A)}$$$$V2.0 |
| 342 | RNA1{[moe](A)[sp].[moe](T)[sp].[moe](T)[sp].[moe]([m5C])[sp].[moe]( |
| | T)[sp].[moe](G)[sp].[moe](A)[sp].[moe](A)[sp].[moe](T)[sp].[moe](T)[sp |
| | ].[moe]([m5C])[sp].[moe](T)[sp].[moe](T)[sp].[moe](T)[sp].[moe]([m5C] |
| | )[sp].[moe](A)[sp].[moe](A)[sp].[moe]([m5C])}$$$$V2.0 |
| 343 | RNA1{[moe]([m5C])[sp].[moe](A)[sp].[moe]([m5C])[sp].[moe](T)[sp].[ |
| | moe](G)[sp].[moe](A)[sp].[moe](T)[sp].[moe](T)[sp].[moe]([m5C])[sp].[ |
| | moe](T)[sp].[moe](G)[sp].[moe](A)[sp].[moe](A)[sp].[moe](T)[sp].[moe]( |
| | T)[sp].[moe]([m5C])[sp].[moe](T)[sp].[moe](T)}$$$$V2.0 |
| 344 | RNA1{[moe]([m5C])[sp].[moe](A)[sp].[moe](T)[sp].[moe]([m5C])[sp].[ |
| | moe]([m5C])[sp].[moe]([m5C])[sp].[moe](A)[sp].[moe]([m5C])[sp].[moe] |
| | (T)[sp].[moe](G)[sp].[moe](A)[sp].[moe](T)[sp].[moe](T)[sp].[moe]([m5 |
| | C])[sp].[moe](T)[sp].[moe](G)[sp].[moe](A)[sp].[moe](A)}$$$$V2.0 |
| 345 | RNA1{[moe](T)[sp].[moe](A)[sp].[moe]([m5C])[sp].[moe](T)[sp].[moe]( |
| | T)[sp].[moe]([m5C])[sp].[moe](A)[sp].[moe](T)[sp].[moe]([m5C])[sp].[m |
| | oe]([m5C])[sp].[moe]([m5C])[sp].[moe](A)[sp].[moe]([m5C])[sp].[moe]( |
| | T)[sp].[moe](G)[sp].[moe](A)[sp].[moe](T)[sp].[moe](T)}$$$$V2.0 |
| 346 | RNA1{[moe](T)[sp].[moe]([m5C])[sp].[moe](T)[sp].[moe](T)[sp].[moe]( |
| | G)[sp].[moe](T)[sp].[moe](A)[sp].[moe]([m5C])[sp].[moe](T)[sp].[moe]( |
| | T)[sp].[moe]([m5C])[sp].[moe](A)[sp].[moe](T)[sp].[moe]([m5C])[sp].[m |
| | oe]([m5C])[sp].[moe]([m5C])[sp].[moe](A)[sp].[moe]([m5C])}$$$$V2.0 |
| 347 | RNA1{[moe](G)[sp].[moe](G)[sp].[moe](T)[sp].[moe](G)[sp].[moe](T)[s |
| | p].[moe](T)[sp].[moe]([m5C])[sp].[moe](T)[sp].[moe](T)[sp].[moe](G)[sp |
| | ].[moe](T)[sp].[moe](A)[sp].[moe]([m5C])[sp].[moe](T)[sp].[moe](T)[sp]. |
| | [moe]([m5C])[sp].[moe](A)[sp].[moe](T)}$$$$V2.0 |
| 348 | RNA1{[moe]([m5C])[sp].[moe](T)[sp].[moe](G)[sp].[moe](A)[sp].[moe]( |
| | A)[sp].[moe](G)[sp].[moe](G)[sp].[moe](T)[sp].[moe](G)[sp].[moe](T)[sp |
| | ].[moe](T)[sp].[moe]([m5C])[sp].[moe](T)[sp].[moe](T)[sp].[moe](G)[sp]. |
| | [moe](T)[sp].[moe](A)[sp].[moe]([m5C])}$$$$V2.0 |
| 349 | RNA1{[moe]([m5C])[sp].[moe](G)[sp].[moe](G)[sp].[moe](T)[sp].[moe]( |
| | T)[sp].[moe]([m5C])[sp].[moe](T)[sp].[moe](G)[sp].[moe](A)[sp].[moe]( |
| | A)[sp].[moe](G)[sp].[moe](G)[sp].[moe](T)[sp].[moe](G)[sp].[moe](T)[sp |
| | ].[moe](T)[sp].[moe]([m5C])[sp].[moe](T)}$$$$V2.0 |
| 350 | RNA1{[moe](G)[sp].[moe]([m5C])[sp].[moe]([m5C])[sp].[moe](T)[sp].[ |
| | moe]([m5C])[sp].[moe]([m5C])[sp].[moe](G)[sp].[moe](G)[sp].[moe](T)[ |
| | sp].[moe](T)[sp].[moe]([m5C])[sp].[moe](T)[sp].[moe](G)[sp].[moe](A)[s |
| | p].[moe](A)[sp].[moe](G)[sp].[moe](G)[sp].[moe](T)}$$$$V2.0 |
| 351 | RNA1{[moe]([m5C])[sp].[moe](T)[sp].[moe](G)[sp].[moe](T)[sp].[moe]( |
| | T)[sp].[moe](G)[sp].[moe]([m5C])[sp].[moe]([m5C])[sp].[moe](T)[sp].[m |
| | oe]([m5C])[sp].[moe]([m5C])[sp].[moe](G)[sp].[moe](G)[sp].[moe](T)[sp |
| | ].[moe](T)[sp].[moe]([m5C])[sp].[moe](T)[sp].[moe](G)}$$$$V2.0 |
| 352 | RNA1{[moe](T)[sp].[moe](T)[sp].[moe]([m5C])[sp].[moe](A)[sp].[moe]( |
| | A)[sp].[moe]([m5C])[sp].[moe](T)[sp].[moe](G)[sp].[moe](T)[sp].[moe]( |
| | T)[sp].[moe](G)[sp].[moe]([m5C])[sp].[moe]([m5C])[sp].[moe](T)[sp].[m |
| | oe]([m5C])[sp].[moe]([m5C])[sp].[moe](G)[sp].[moe](G)}$$$$V2.0 |
| 353 | RNA1{[moe](T)[sp].[moe](T)[sp].[moe](T)[sp].[moe]([m5C])[sp].[moe]( |
| | A)[sp].[moe](T)[sp].[moe](T)[sp].[moe]([m5C])[sp].[moe](A)[sp].[moe]( |
| | A)[sp].[moe]([m5C])[sp].[moe](T)[sp].[moe](G)[sp].[moe](T)[sp].[moe]( |
| | T)[sp].[moe](G)[sp].[moe]([m5C])[sp].[moe]([m5C])}$$$$V2.0 |
| 354 | RNA1{[moe](T)[sp].[moe](A)[sp].[moe](A)[sp].[moe]([m5C])[sp].[moe]( |
| | A)[sp].[moe](T)[sp].[moe](T)[sp].[moe](T)[sp].[moe]([m5C])[sp].[moe]( |
| | A)[sp].[moe](T)[sp].[moe](T)[sp].[moe]([m5C])[sp].[moe](A)[sp].[moe]( |
| | A)[sp].[moe]([m5C])[sp].[moe](T)[sp].[moe](G)}$$$$V2.0 |
| 355 | RNA1{[moe](T)[sp].[moe]([m5C])[sp].[moe]([m5C])[sp].[moe](T)[sp].[m |
| | oe](T)[sp].[moe](T)[sp].[moe](A)[sp].[moe](A)[sp].[moe]([m5C])[sp].[mo |
| | e](A)[sp].[moe](T)[sp].[moe](T)[sp].[moe](T)[sp].[moe]([m5C])[sp].[moe |
| | ](A)[sp].[moe](T)[sp].[moe](T)[sp].[moe]([m5C])}$$$$V2.0 |
| 356 | RNA1{[moe](T)[sp].[moe](T)[sp].[moe](G)[sp].[moe](A)[sp].[moe](A)[s |
| | p].[moe](T)[sp].[moe]([m5C])[sp].[moe]([m5C])[sp].[moe](T)[sp].[moe]( |
| | T)[sp].[moe](T)[sp].[moe](A)[sp].[moe](A)[sp].[moe]([m5C])[sp].[moe]( |
| | A)[sp].[moe](T)[sp].[moe](T)[sp].[moe](T)}$$$$V2.0 |
| 357 | RNA1{[moe](T)[sp].[moe](T)[sp].[moe](G)[sp].[moe](T)[sp].[moe](G)[sp |
| | ].[moe](T)[sp].[moe](T)[sp].[moe](G)[sp].[moe](A)[sp].[moe](A)[sp].[mo |
| | e](T)[sp].[moe]([m5C])[sp].[moe]([m5C])[sp].[moe](T)[sp].[moe](T)[sp].[ |
| | moe](T)[sp].[moe](A)[sp].[moe](A)}$$$$V2.0 |
| 358 | RNA1{[moe](A)[sp].[moe](G)[sp].[moe]([m5C])[sp].[moe]([m5C])[sp].[ |
| | moe](A)[sp].[moe](T)[sp].[moe](T)[sp].[moe](G)[sp].[moe](T)[sp].[moe]( |
| | G)[sp].[moe](T)[sp].[moe](T)[sp].[moe](G)[sp].[moe](A)[sp].[moe](A)[sp |
| | ].[moe](T)[sp].[moe]([m5C])[sp].[moe]([m5C])}$$$$V2.0 |
| 359 | RNA1{[moe]([m5C])[sp].[moe](T)[sp].[moe](T)[sp].[moe]([m5C])[sp].[m |
| | oe]([m5C])[sp].[moe](A)[sp].[moe](G)[sp].[moe]([m5C])[sp].[moe]([m5C |
| | ])[sp].[moe](A)[sp].[moe](T)[sp].[moe](T)[sp].[moe](G)[sp].[moe](T)[sp]. |
| | [moe](G)[sp].[moe](T)[sp].[moe](T)[sp].[moe](G)}$$$$V2.0 |
| 360 | RNA1{[moe]([m5C])[sp].[moe](T)[sp].[moe](T)[sp].[moe](A)[sp].[moe]( |
| | G)[sp].[moe]([m5C])[sp].[moe](T)[sp].[moe](T)[sp].[moe]([m5C])[sp].[m |
| | oe]([m5C])[sp].[moe](A)[sp].[moe](G)[sp].[moe]([m5C])[sp].[moe]([m5C |
| | ])[sp].[moe](A)[sp].[moe](T)[sp].[moe](T)[sp].[moe](G)}$$$$V2.0 |
| 361 | RNA1{[moe](T)[sp].[moe]([m5C])[sp].[moe](T)[sp].[moe](T)[sp].[moe]([ |
| | m5C])[sp].[moe]([m5C])[sp].[moe](T)[sp].[moe](T)[sp].[moe](A)[sp].[mo |
| | e](G)[sp].[moe]([m5C])[sp].[moe](T)[sp].[moe](T)[sp].[moe]([m5C])[sp]. |
| | [moe]([m5C])[sp].[moe](A)[sp].[moe](G)[sp].[moe]([m5C])}$$$$V2.0 |
| 362 | RNA1{[moe]([m5C])[sp].[moe](A)[sp].[moe](G)[sp].[moe]([m5C])[sp].[ |
| | moe](T)[sp].[moe](T)[sp].[moe]([m5C])[sp].[moe](T)[sp].[moe](T)[sp].[ |
| | moe]([m5C])[sp].[moe]([m5C])[sp].[moe](T)[sp].[moe](T)[sp].[moe](A)[s |
| | p].[moe](G)[sp].[moe]([m5C])[sp].[moe](T)[sp].[moe](T)}$$$$V2.0 |
| 363 | RNA1{[moe]([m5C])[sp].[moe](T)[sp].[moe](G)[sp].[moe]([m5C])[sp].[ |
| | moe](T)[sp].[moe]([m5C])[sp].[moe](A)[sp].[moe](G)[sp].[moe]([m5C])[ |
| | sp].[moe](T)[sp].[moe](T)[sp].[moe]([m5C])[sp].[moe](T)[sp].[moe](T)[s |
| | p].[moe]([m5C])[sp].[moe]([m5C])[sp].[moe](T)[sp].[moe](T)}$$$$V2.0 |
| 364 | RNA1{[moe](A)[sp].[moe](A)[sp].[moe](G)[sp].[moe](A)[sp].[moe]([m5 |
| | C])[sp].[moe]([m5C])[sp].[moe](T)[sp].[moe](G)[sp].[moe]([m5C])[sp].[ |
| | moe](T)[sp].[moe]([m5C])[sp].[moe](A)[sp].[moe](G)[sp].[moe]([m5C])[ |
| | sp].[moe](T)[sp].[moe](T)[sp].[moe]([m5C])[sp].[moe](T)}$$$$V2.0 |
| 365 | RNA1{[moe](G)[sp].[moe](T)[sp].[moe]([m5C])[sp].[moe]([m5C])[sp].[ |
| | moe](T)[sp].[moe](A)[sp].[moe](A)[sp].[moe](G)[sp].[moe](A)[sp].[moe] |
| | ([m5C])[sp].[moe]([m5C])[sp].[moe](T)[sp].[moe](G)[sp].[moe]([m5C])[s |
| | p].[moe](T)[sp].[moe]([m5C])[sp].[moe](A)[sp].[moe](G)}$$$$V2.0 |
| 366 | RNA1{[moe](G)[sp].[moe](G)[sp].[moe]([m5C])[sp].[moe]([m5C])[sp].[ |
| | moe](T)[sp].[moe](G)[sp].[moe](T)[sp].[moe]([m5C])[sp].[moe]([m5C])[s |
| | p].[moe](T)[sp].[moe](A)[sp].[moe](A)[sp].[moe](G)[sp].[moe](A)[sp].[m |
| | oe]([m5C])[sp].[moe]([m5C])[sp].[moe](T)[sp].[moe](G)}$$$$V2.0 |
| 367 | RNA1{[moe](G)[sp].[moe]([m5C])[sp].[moe](T)[sp].[moe]([m5C])[sp].[ |
| | moe](T)[sp].[moe](G)[sp].[moe](G)[sp].[moe]([m5C])[sp].[moe]([m5C])[ |
| | sp].[moe](T)[sp].[moe](G)[sp].[moe](T)[sp].[moe]([m5C])[sp].[moe]([m5 |
| | C])[sp].[moe](T)[sp].[moe](A)[sp].[moe](A)[sp].[moe](G)}$$$$V2.0 |
| 368 | RNA1{[moe](G)[sp].[moe]([m5C])[sp].[moe](T)[sp].[moe](T)[sp].[moe]( |
| | G)[sp].[moe](G)[sp].[moe]([m5C])[sp].[moe](T)[sp].[moe]([m5C])[sp].[m |
| | oe](T)[sp].[moe](G)[sp].[moe](G)[sp].[moe]([m5C])[sp].[moe]([m5C])[sp |
| | ].[moe](T)[sp].[moe](G)[sp].[moe](T)[sp].[moe]([m5C])}$$$$V2.0 |
| 369 | RNA1{[moe]([m5C])[sp].[moe](T)[sp].[moe]([m5C])[sp].[moe](A)[sp].[ |
| | moe](A)[sp].[moe](G)[sp].[moe]([m5C])[sp].[moe](T)[sp].[moe](T)[sp].[ |
| | moe](G)[sp].[moe](G)[sp].[moe]([m5C])[sp].[moe](T)[sp].[moe]([m5C])[ |
| | sp].[moe](T)[sp].[moe](G)[sp].[moe](G)[sp].[moe]([m5C])}$$$$V2.0 |
| 370 | RNA1{[moe]([m5C])[sp].[moe](A)[sp].[moe](T)[sp].[moe](G)[sp].[moe]( |
| | A)[sp].[moe]([m5C])[sp].[moe](T)[sp].[moe]([m5C])[sp].[moe](A)[sp].[m |
| | oe](A)[sp].[moe](G)[sp].[moe]([m5C])[sp].[moe](T)[sp].[moe](T)[sp].[mo |
| | e](G)[sp].[moe](G)[sp].[moe]([m5C])[sp].[moe](T)}$$$$V2.0 |
| 371 | RNA1{[moe]([m5C])[sp].[moe]([m5C])[sp].[moe](T)[sp].[moe](T)[sp].[m |
| | oe]([m5C])[sp].[moe]([m5C])[sp].[moe](A)[sp].[moe](T)[sp].[moe](G)[sp |
| | ].[moe](A)[sp].[moe]([m5C])[sp].[moe](T)[sp].[moe]([m5C])[sp].[moe](A |
| | )[sp].[moe](A)[sp].[moe](G)[sp].[moe]([m5C])[sp].[moe](T)}$$$$V2.0 |
| 372 | RNA1{[moe](A)[sp].[moe]([m5C])[sp].[moe]([m5C])[sp].[moe]([m5C])[s |
| | p].[moe](T)[sp].[moe]([m5C])[sp].[moe]([m5C])[sp].[moe](T)[sp].[moe]( |
| | T)[sp].[moe]([m5C])[sp].[moe]([m5C])[sp].[moe](A)[sp].[moe](T)[sp].[m |
| | oe](G)[sp].[moe](A)[sp].[moe]([m5C])[sp].[moe](T)[sp].[moe]([m5C])}$ |
| | $$$V2.0 |
| 373 | RNA1{[moe](T)[sp].[moe](A)[sp].[moe](G)[sp].[moe](G)[sp].[moe](G)[s |
| | p].[moe](A)[sp].[moe]([m5C])[sp].[moe]([m5C])[sp].[moe]([m5C])[sp].[ |
| | moe](T)[sp].[moe]([m5C])[sp].[moe]([m5C])[sp].[moe](T)[sp].[moe](T)[s |
| | p].[moe]([m5C])[sp].[moe]([m5C])[sp].[moe](A)[sp].[moe](T)}$$$$V2.0 |
| 374 | RNA1{[moe]([m5C])[sp].[moe](T)[sp].[moe](G)[sp].[moe](T)[sp].[moe]( |
| | A)[sp].[moe](T)[sp].[moe](A)[sp].[moe](G)[sp].[moe](G)[sp].[moe](G)[sp |
| | ].[moe](A)[sp].[moe]([m5C])[sp].[moe]([m5C])[sp].[moe]([m5C])[sp].[m |
| | oe](T)[sp].[moe]([m5C])[sp].[moe]([m5C])[sp].[moe](T)}$$$$V2.0 |
| 375 | RNA1{[moe](A)[sp].[moe](T)[sp].[moe]([m5C])[sp].[moe](T)[sp].[moe]( |
| | A)[sp].[moe]([m5C])[sp].[moe](T)[sp].[moe](G)[sp].[moe](T)[sp].[moe]( |
| | A)[sp].[moe](T)[sp].[moe](A)[sp].[moe](G)[sp].[moe](G)[sp].[moe](G)[sp |
| | ].[moe](A)[sp].[moe]([m5C])[sp].[moe]([m5C])}$$$$V2.0 |
| 376 | RNA1{[moe](A)[sp].[moe](T)[sp].[moe](T)[sp].[moe](G)[sp].[moe]([m5 |
| | C])[sp].[moe](A)[sp].[moe](T)[sp].[moe]([m5C])[sp].[moe](T)[sp].[moe]( |
| | A)[sp].[moe]([m5C])[sp].[moe](T)[sp].[moe](G)[sp].[moe](T)[sp].[moe]( |
| | A)[sp].[moe](T)[sp].[moe](A)[sp].[moe](G)}$$$$V2.0 |
| 377 | RNA1{[moe](T)[sp].[moe](T)[sp].[moe](T)[sp].[moe](G)[sp].[moe](G)[sp |
| | ].[moe](A)[sp].[moe](T)[sp].[moe](T)[sp].[moe](G)[sp].[moe]([m5C])[sp] |
| | .[moe](A)[sp].[moe](T)[sp].[moe]([m5C])[sp].[moe](T)[sp].[moe](A)[sp]. |
| | [moe]([m5C])[sp].[moe](T)[sp].[moe](G)}$$$$V2.0 |
| 378 | RNA1{[moe](T)[sp].[moe](T)[sp].[moe](T)[sp].[moe]([m5C])[sp].[moe]( |
| | T)[sp].[moe](T)[sp].[moe](T)[sp].[moe](T)[sp].[moe](G)[sp].[moe](G)[sp] |
| | .[moe](A)[sp].[moe](T)[sp].[moe](T)[sp].[moe](G)[sp].[moe]([m5C])[sp]. |
| | [moe](A)[sp].[moe](T)[sp].[moe]([m5C])}$$$$V2.0 |
| 379 | RNA1{[moe](G)[sp].[moe](T)[sp].[moe](G)[sp].[moe](A)[sp].[moe](T)[s |
| | p].[moe](T)[sp].[moe](T)[sp].[moe](T)[sp].[moe]([m5C])[sp].[moe](T)[sp |
| | ].[moe](T)[sp].[moe](T)[sp].[moe](T)[sp].[moe](G)[sp].[moe](G)[sp].[mo |
| | e](A)[sp].[moe](T)[sp].[moe](T)}$$$$V2.0 |
| 380 | RNA1{[moe](T)[sp].[moe](T)[sp].[moe](T)[sp].[moe]([m5C])[sp].[moe]( |
| | T)[sp].[moe](G)[sp].[moe](T)[sp].[moe](G)[sp].[moe](A)[sp].[moe](T)[sp |
| | ].[moe](T)[sp].[moe](T)[sp].[moe](T)[sp].[moe]([m5C])[sp].[moe](T)[sp]. |
| | [moe](T)[sp].[moe](T)[sp].[moe](T)}$$$$V2.0 |
| 381 | RNA1{[moe]([m5C])[sp].[moe](T)[sp].[moe](T)[sp].[moe](G)[sp].[moe]( |
| | G)[sp].[moe](T)[sp].[moe](T)[sp].[moe](T)[sp].[moe]([m5C])[sp].[moe](T |
| | )[sp].[moe](G)[sp].[moe](T)[sp].[moe](G)[sp].[moe](A)[sp].[moe](T)[sp]. |
| | [moe](T)[sp].[moe](T)[sp].[moe](T)}$$$$V2.0 |
| 382 | RNA1{[moe]([m5C])[sp].[moe](T)[sp].[moe](A)[sp].[moe](A)[sp].[moe]( |
| | [m5C])[sp].[moe]([m5C])[sp].[moe](T)[sp].[moe](T)[sp].[moe](G)[sp].[m |
| | oe](G)[sp].[moe](T)[sp].[moe](T)[sp].[moe](T)[sp].[moe]([m5C])[sp].[mo |
| | e](T)[sp].[moe](G)[sp].[moe](T)[sp].[moe](G)}$$$$V2.0 |
| 383 | RNA1{[moe](T)[sp].[moe](G)[sp].[moe](A)[sp].[moe](T)[sp].[moe](A)[s |
| | p].[moe]([m5C])[sp].[moe](T)[sp].[moe](A)[sp].[moe](A)[sp].[moe]([m5 |
| | C])[sp].[moe]([m5C])[sp].[moe](T)[sp].[moe](T)[sp].[moe](G)[sp].[moe]( |
| | G)[sp].[moe](T)[sp].[moe](T)[sp].[moe](T)}$$$$V2.0 |
| 384 | RNA1{[moe](A)[sp].[moe](T)[sp].[moe]([m5C])[sp].[moe](T)[sp].[moe]( |
| | T)[sp].[moe](T)[sp].[moe](G)[sp].[moe](A)[sp].[moe](T)[sp].[moe](A)[sp |
| | ].[moe]([m5C])[sp].[moe](T)[sp].[moe](A)[sp].[moe](A)[sp].[moe]([m5C] |
| | )[sp].[moe]([m5C])[sp].[moe](T)[sp].[moe](T)}$$$$V2.0 |
| 385 | RNA1{[moe](A)[sp].[moe](A)[sp].[moe](G)[sp].[moe](G)[sp].[moe](T)[s |
| | p].[moe](A)[sp].[moe](T)[sp].[moe]([m5C])[sp].[moe](T)[sp].[moe](T)[sp |
| | ].[moe](T)[sp].[moe](G)[sp].[moe](A)[sp].[moe](T)[sp].[moe](A)[sp].[mo |
| | e]([m5C])[sp].[moe](T)[sp].[moe](A)}$$$$V2.0 |
| 386 | RNA1{[moe](T)[sp].[moe](T)[sp].[moe](A)[sp].[moe](A)[sp].[moe](A)[s |
| | p].[moe](A)[sp].[moe](A)[sp].[moe](G)[sp].[moe](G)[sp].[moe](T)[sp].[m |
| | oe](A)[sp].[moe](T)[sp].[moe]([m5C])[sp].[moe](T)[sp].[moe](T)[sp].[mo |
| | e](T)[sp].[moe](G)[sp].[moe](A)}$$$$V2.0 |
| 387 | RNA1{[moe](T)[sp].[moe](T)[sp].[moe](A)[sp].[moe](T)[sp].[moe](T)[sp |
| | ].[moe](T)[sp].[moe](T)[sp].[moe](A)[sp].[moe](A)[sp].[moe](A)[sp].[mo |
| | e](A)[sp].[moe](A)[sp].[moe](G)[sp].[moe](G)[sp].[moe](T)[sp].[moe](A) |
| | [sp].[moe](T)[sp].[moe]([m5C])}$$$$V2.0 |
| 388 | RNA1{[moe](G)[sp].[moe](T)[sp].[moe](A)[sp].[moe](T)[sp].[moe](T)[sp |
| | ].[moe](T)[sp].[moe](T)[sp].[moe](A)[sp].[moe](T)[sp].[moe](T)[sp].[moe |
| | ](T)[sp].[moe](T)[sp].[moe](A)[sp].[moe](A)[sp].[moe](A)[sp].[moe](A)[ |
| | sp].[moe](A)[sp].[moe](G)}$$$$V2.0 |
| 389 | RNA1{[moe](A)[sp].[moe](A)[sp].[moe]([m5C])[sp].[moe]([m5C])[sp].[ |
| | moe](A)[sp].[moe](G)[sp].[moe](T)[sp].[moe](A)[sp].[moe](T)[sp].[moe]( |
| | T)[sp].[moe](T)[sp].[moe](T)[sp].[moe](A)[sp].[moe](T)[sp].[moe](T)[sp] |
| | .[moe](T)[sp].[moe](T)[sp].[moe](A)}$$$$V2.0 |
| 390 | RNA1{[moe](A)[sp].[moe](A)[sp].[moe](T)[sp].[moe](G)[sp].[moe](T)[s |
| | p].[moe](A)[sp].[moe](A)[sp].[moe]([m5C])[sp].[moe]([m5C])[sp].[moe]( |
| | A)[sp].[moe](G)[sp].[moe](T)[sp].[moe](A)[sp].[moe](T)[sp].[moe](T)[sp |
| | ].[moe](T)[sp].[moe](T)[sp].[moe](A)}$$$$V2.0 |
| 391 | RNA1{[moe](T)[sp].[moe](A)[sp].[moe](T)[sp].[moe]([m5C])[sp].[moe]( |
| | A)[sp].[moe](A)[sp].[moe](A)[sp].[moe](T)[sp].[moe](G)[sp].[moe](T)[sp |
| | ].[moe](A)[sp].[moe](A)[sp].[moe]([m5C])[sp].[moe]([m5C])[sp].[moe]( |
| | A)[sp].[moe](G)[sp].[moe](T)[sp].[moe](A)}$$$$V2.0 |
| 392 | RNA1{[lna](T)[sp].[lna](G)[sp].[moe](A)[sp].[moe](T)[sp].[moe](T)[sp].[ |
| | moe]([m5C])[sp].[moe](T)[sp].[moe](G)[sp].[moe](A)[sp].[moe](A)[sp].[ |
| | moe](T)[sp].[moe](T)[sp].[moe]([m5C])[sp].[moe](T)[sp].[moe](T)[sp].[ |
| | moe](T)[sp].[lna]([m5C])[sp].[lna](A)}$$$$V2.0 |
| 393 | RNA1{[lna]([m5C])[sp].[lna](T)[sp].[moe](G)[sp].[moe](A)[sp].[moe](T) |
| | [sp].[moe](T)[sp].[moe]([m5C])[sp].[moe](T)[sp].[moe](G)[sp].[moe](A)[ |
| | sp].[moe](A)[sp].[moe](T)[sp].[moe](T)[sp].[moe]([m5C])[sp].[moe](T)[s |
| | p].[moe](T)[sp].[lna](T)[sp].[lna]([m5C])}$$$$V2.0 |
| 394 | RNA1{[lna](A)[sp].[lna]([m5C])[sp].[moe](T)[sp].[moe](G)[sp].[moe](A) |
| | [sp].[moe](T)[sp].[moe](T)[sp].[moe]([m5C])[sp].[moe](T)[sp].[moe](G)[ |
| | sp].[moe](A)[sp].[moe](A)[sp].[moe](T)[sp].[moe](T)[sp].[moe]([m5C])[s |
| | p].[moe](T)[sp].[lna](T)[sp].[lna](T)}$$$$V2.0 |
| 395 | RNA1{[lna]([m5C])[sp].[lna](A)[sp].[moe]([m5C])[sp].[moe](T)[sp].[mo |
| | e](G)[sp].[moe](A)[sp].[moe](T)[sp].[moe](T)[sp].[moe]([m5C])[sp].[moe |
| | ](T)[sp].[moe](G)[sp].[moe](A)[sp].[moe](A)[sp].[moe](T)[sp].[moe](T)[s |
| | p].[moe]([m5C])[sp].[lna](T)[sp].[lna](T)}$$$$V2.0 |
| 396 | RNA1{[lna]([m5C])[sp].[lna]([m5C])[sp].[moe](A)[sp].[moe]([m5C])[sp]. |
| | [moe](T)[sp].[moe](G)[sp].[moe](A)[sp].[moe](T)[sp].[moe](T)[sp].[moe] |
| | ([m5C])[sp].[moe](T)[sp].[moe](G)[sp].[moe](A)[sp].[moe](A)[sp].[moe]( |
| | T)[sp].[moe](T)[sp].[lna]([m5C])[sp].[lna](T)}$$$$V2.0 |
| 397 | RNA1{[lna]([m5C])[sp].[lna]([m5C])[sp].[moe]([m5C])[sp].[moe](A)[sp]. |
| | [moe]([m5C])[sp].[moe](T)[sp].[moe](G)[sp].[moe](A)[sp].[moe](T)[sp].[ |
| | moe](T)[sp].[moe]([m5C])[sp].[moe](T)[sp].[moe](G)[sp].[moe](A)[sp].[ |
| | moe](A)[sp].[moe](T)[sp].[lna](T)[sp].[lna]([m5C])}$$$$V2.0 |
| 398 | RNA1{[lna](T)[sp].[lna]([m5C])[sp].[moe]([m5C])[sp].[moe]([m5C])[sp]. |
| | [moe](A)[sp].[moe]([m5C])[sp].[moe](T)[sp].[moe](G)[sp].[moe](A)[sp].[ |
| | moe](T)[sp].[moe](T)[sp].[moe]([m5C])[sp].[moe](T)[sp].[moe](G)[sp].[ |
| | moe](A)[sp].[moe](A)[sp].[lna](T)[sp].[lna](T)}$$$$V2.0 |
| 399 | RNA1{[lna](A)[sp].[lna](T)[sp].[moe]([m5C])[sp].[moe]([m5C])[sp].[mo |
| | e]([m5C])[sp].[moe](A)[sp].[moe]([m5C])[sp].[moe](T)[sp].[moe](G)[sp]. |
| | [moe](A)[sp].[moe](T)[sp].[moe](T)[sp].[moe]([m5C])[sp].[moe](T)[sp].[ |
| | moe](G)[sp].[moe](A)[sp].[lna](A)[sp].[lna](T)}$$$$V2.0 |
| 400 | RNA1{[lna]([m5C])[sp].[lna](A)[sp].[moe](T)[sp].[moe]([m5C])[sp].[mo |
| | e]([m5C])[sp].[moe]([m5C])[sp].[moe](A)[sp].[moe]([m5C])[sp].[moe](T) |
| | [sp].[moe](G)[sp].[moe](A)[sp].[moe](T)[sp].[moe](T)[sp].[moe]([m5C])[ |
| | sp].[moe](T)[sp].[moe](G)[sp].[lna](A)[sp].[lna](A)}$$$$V2.0 |
| 401 | RNA1{[lna](T)[sp].[lna]([m5C])[sp].[moe](A)[sp].[moe](T)[sp].[moe]([m |
| | 5C])[sp].[moe]([m5C])[sp].[moe]([m5C])[sp].[moe](A)[sp].[moe]([m5C]) |
| | [sp].[moe](T)[sp].[moe](G)[sp].[moe](A)[sp].[moe](T)[sp].[moe](T)[sp].[ |
| | moe]([m5C])[sp].[moe](T)[sp].[lna](G)[sp].[lna](A)}$$$$V2.0 |
| 402 | RNA1{[lna](T)[sp].[lna](T)[sp].[moe]([m5C])[sp].[moe](A)[sp].[moe](T)[ |
| | sp].[moe]([m5C])[sp].[moe]([m5C])[sp].[moe]([m5C])[sp].[moe](A)[sp].[ |
| | moe]([m5C])[sp].[moe](T)[sp].[moe](G)[sp].[moe](A)[sp].[moe](T)[sp].[ |
| | moe](T)[sp].[moe]([m5C])[sp].[lna](T)[sp].[lna](G)}$$$$V2.0 |
| 403 | RNA1{[lna]([m5C])[sp].[lna](T)[sp].[moe](T)[sp].[moe]([m5C])[sp].[moe |
| | ](A)[sp].[moe](T)[sp].[moe]([m5C])[sp].[moe]([m5C])[sp].[moe]([m5C])[ |
| | sp].[moe](A)[sp].[moe]([m5C])[sp].[moe](T)[sp].[moe](G)[sp].[moe](A)[s |
| | p].[moe](T)[sp].[moe](T)[sp].[lna]([m5C])[sp].[lna](T)}$$$$V2.0 |
| 404 | RNA1{[lna](A)[sp].[lna]([m5C])[sp].[moe](T)[sp].[moe](T)[sp].[moe]([m |
| | 5C])[sp].[moe](A)[sp].[moe](T)[sp].[moe]([m5C])[sp].[moe]([m5C])[sp].[ |
| | moe]([m5C])[sp].[moe](A)[sp].[moe]([m5C])[sp].[moe](T)[sp].[moe](G)[ |
| | sp].[moe](A)[sp].[moe](T)[sp].[lna](T)[sp].[lna]([m5C])}$$$$V2.0 |
| 405 | RNA1{[lna](T)[sp].[lna](A)[sp].[moe]([m5C])[sp].[moe](T)[sp].[moe](T)[ |
| | sp].[moe]([m5C])[sp].[moe](A)[sp].[moe](T)[sp].[moe]([m5C])[sp].[moe] |
| | ([m5C])[sp].[moe]([m5C])[sp].[moe](A)[sp].[moe]([m5C])[sp].[moe](T)[s |
| | p].[moe](G)[sp].[moe](A)[sp].[lna](T)[sp].[lna](T)}$$$$V2.0 |
| 406 | RNA1{[lna](G)[sp].[lna](T)[sp].[moe](A)[sp].[moe]([m5C])[sp].[moe](T) |
| | [sp].[moe](T)[sp].[moe]([m5C])[sp].[moe](A)[sp].[moe](T)[sp].[moe]([m |
| | 5C])[sp].[moe]([m5C])[sp].[moe]([m5C])[sp].[moe](A)[sp].[moe]([m5C]) |
| | [sp].[moe](T)[sp].[moe](G)[sp].[lna](A)[sp].[lna](T)}$$$$V2.0 |
| 407 | RNA1{[lna](T)[sp].[lna](G)[sp].[moe](T)[sp].[moe](A)[sp].[moe]([m5C]) |
| | [sp].[moe](T)[sp].[moe](T)[sp].[moe]([m5C])[sp].[moe](A)[sp].[moe](T)[ |
| | sp].[moe]([m5C])[sp].[moe]([m5C])[sp].[moe]([m5C])[sp].[moe](A)[sp].[ |
| | moe]([m5C])[sp].[moe](T)[sp].[lna](G)[sp].[lna](A)}$$$$V2.0 |
| 408 | RNA1{[lna](T)[sp].[lna](T)[sp].[moe](G)[sp].[moe](T)[sp].[moe](A)[sp].[ |
| | moe]([m5C])[sp].[moe](T)[sp].[moe](T)[sp].[moe]([m5C])[sp].[moe](A)[s |
| | p].[moe](T)[sp].[moe]([m5C])[sp].[moe]([m5C])[sp].[moe]([m5C])[sp].[m |
| | oe](A)[sp].[moe]([m5C])[sp].[lna](T)[sp].[lna](G)}$$$$V2.0 |
| 409 | RNA1{[lna]([m5C])[sp].[lna](T)[sp].[moe](T)[sp].[moe](G)[sp].[moe](T)[ |
| | sp].[moe](A)[sp].[moe]([m5C])[sp].[moe](T)[sp].[moe](T)[sp].[moe]([m5 |
| | C])[sp].[moe](A)[sp].[moe](T)[sp].[moe]([m5C])[sp].[moe]([m5C])[sp].[ |
| | moe]([m5C])[sp].[moe](A)[sp].[lna]([m5C])[sp].[lna](T)}$$$$V2.0 |
| 410 | RNA1{[lna](T)[sp].[lna]([m5C])[sp].[moe](T)[sp].[moe](T)[sp].[moe](G)[ |
| | sp].[moe](T)[sp].[moe](A)[sp].[moe]([m5C])[sp].[moe](T)[sp].[moe](T)[s |
| | p].[moe]([m5C])[sp].[moe](A)[sp].[moe](T)[sp].[moe]([m5C])[sp].[moe]( |
| | [m5C])[sp].[moe]([m5C])[sp].[lna](A)[sp].[lna]([m5C])}$$$$V2.0 |
| 411 | RNA1{[lna](T)[sp].[lna](T)[sp].[moe]([m5C])[sp].[moe](T)[sp].[moe](T)[ |
| | sp].[moe](G)[sp].[moe](T)[sp].[moe](A)[sp].[moe]([m5C])[sp].[moe](T)[s |
| | p].[moe](T)[sp].[moe]([m5C])[sp].[moe](A)[sp].[moe](T)[sp].[moe]([m5C |
| | ])[sp].[moe]([m5C])[sp].[lna]([m5C])[sp].[lna](A)}$$$$V2.0 |
| 412 | RNA1{[lna](G)[sp].[lna](T)[sp].[moe](T)[sp].[moe]([m5C])[sp].[moe](T)[ |
| | sp].[moe](T)[sp].[moe](G)[sp].[moe](T)[sp].[moe](A)[sp].[moe]([m5C])[s |
| | p].[moe](T)[sp].[moe](T)[sp].[moe]([m5C])[sp].[moe](A)[sp].[moe](T)[sp |
| | ].[moe]([m5C])[sp].[lna]([m5C])[sp].[lna]([m5C])}$$$$V2.0 |
| 413 | RNA1{[lna](T)[sp].[lna](G)[sp].[moe](T)[sp].[moe](T)[sp].[moe]([m5C])[ |
| | sp].[moe](T)[sp].[moe](T)[sp].[moe](G)[sp].[moe](T)[sp].[moe](A)[sp].[ |
| | moe]([m5C])[sp].[moe](T)[sp].[moe](T)[sp].[moe]([m5C])[sp].[moe](A)[s |
| | p].[moe](T)[sp].[lna]([m5C])[sp].[lna]([m5C])}$$$$V2.0 |
| 414 | RNA1{[lna](G)[sp].[lna](T)[sp].[moe](G)[sp].[moe](T)[sp].[moe](T)[sp].[ |
| | moe]([m5C])[sp].[moe](T)[sp].[moe](T)[sp].[moe](G)[sp].[moe](T)[sp].[ |
| | moe](A)[sp].[moe]([m5C])[sp].[moe](T)[sp].[moe](T)[sp].[moe]([m5C])[s |
| | p].[moe](A)[sp].[lna](T)[sp].[lna]([m5C])}$$$$V2.0 |
| 415 | RNA1{[lna](G)[sp].[lna](G)[sp].[moe](T)[sp].[moe](G)[sp].[moe](T)[sp].[ |
| | moe](T)[sp].[moe]([m5C])[sp].[moe](T)[sp].[moe](T)[sp].[moe](G)[sp].[ |
| | moe](T)[sp].[moe](A)[sp].[moe]([m5C])[sp].[moe](T)[sp].[moe](T)[sp].[ |
| | moe]([m5C])[sp].[lna](A)[sp].[lna](T)}$$$$V2.0 |
| 416 | RNA1{[lna](A)[sp].[lna](G)[sp].[moe](G)[sp].[moe](T)[sp].[moe](G)[sp]. |
| | [moe](T)[sp].[moe](T)[sp].[moe]([m5C])[sp].[moe](T)[sp].[moe](T)[sp].[ |
| | moe](G)[sp].[moe](T)[sp].[moe](A)[sp].[moe]([m5C])[sp].[moe](T)[sp].[ |
| | moe](T)[sp].[lna]([m5C])[sp].[lna](A)}$$$$V2.0 |
| 417 | RNA1{[lna](A)[sp].[lna](A)[sp].[moe](G)[sp].[moe](G)[sp].[moe](T)[sp]. |
| | [moe](G)[sp].[moe](T)[sp].[moe](T)[sp].[moe]([m5C])[sp].[moe](T)[sp].[ |
| | moe](T)[sp].[moe](G)[sp].[moe](T)[sp].[moe](A)[sp].[moe]([m5C])[sp].[ |
| | moe](T)[sp].[lna](T)[sp].[lna]([m5C])}$$$$V2.0 |
| 418 | RNA1{[lna](G)[sp].[lna](A)[sp].[moe](A)[sp].[moe](G)[sp].[moe](G)[sp]. |
| | [moe](T)[sp].[moe](G)[sp].[moe](T)[sp].[moe](T)[sp].[moe]([m5C])[sp].[ |
| | moe](T)[sp].[moe](T)[sp].[moe](G)[sp].[moe](T)[sp].[moe](A)[sp].[moe]( |
| | [m5C])[sp].[lna](T)[sp].[lna](T)}$$$$V2.0 |
| 419 | RNA1{[lna](T)[sp].[lna](G)[sp].[moe](A)[sp].[moe](A)[sp].[moe](G)[sp]. |
| | [moe](G)[sp].[moe](T)[sp].[moe](G)[sp].[moe](T)[sp].[moe](T)[sp].[moe] |
| | ([m5C])[sp].[moe](T)[sp].[moe](T)[sp].[moe](G)[sp].[moe](T)[sp].[moe]( |
| | A)[sp].[lna]([m5C])[sp].[lna](T)}$$$$V2.0 |
| 420 | RNA1{[lna]([m5C])[sp].[lna](T)[sp].[moe](G)[sp].[moe](A)[sp].[moe](A) |
| | [sp].[moe](G)[sp].[moe](G)[sp].[moe](T)[sp].[moe](G)[sp].[moe](T)[sp].[ |
| | moe](T)[sp].[moe]([m5C])[sp].[moe](T)[sp].[moe](T)[sp].[moe](G)[sp].[ |
| | moe](T)[sp].[lna](A)[sp].[lna]([m5C])}$$$$V2.0 |
| 421 | RNA1{[lna](T)[sp].[lna]([m5C])[sp].[moe](T)[sp].[moe](G)[sp].[moe](A) |
| | [sp].[moe](A)[sp].[moe](G)[sp].[moe](G)[sp].[moe](T)[sp].[moe](G)[sp].[ |
| | moe](T)[sp].[moe](T)[sp].[moe]([m5C])[sp].[moe](T)[sp].[moe](T)[sp].[ |
| | moe](G)[sp].[lna](T)[sp].[lna](A)}$$$$V2.0 |
| 422 | RNA1{[lna](T)[sp].[lna](T)[sp].[moe]([m5C])[sp].[moe](T)[sp].[moe](G)[ |
| | sp].[moe](A)[sp].[moe](A)[sp].[moe](G)[sp].[moe](G)[sp].[moe](T)[sp].[ |
| | moe](G)[sp].[moe](T)[sp].[moe](T)[sp].[moe]([m5C])[sp].[moe](T)[sp].[ |
| | moe](T)[sp].[lna](G)[sp].[lna](T)}$$$$V2.0 |
| 423 | RNA1{[lna](G)[sp].[lna](T)[sp].[moe](T)[sp].[moe]([m5C])[sp].[moe](T)[ |
| | sp].[moe](G)[sp].[moe](A)[sp].[moe](A)[sp].[moe](G)[sp].[moe](G)[sp].[ |
| | moe](T)[sp].[moe](G)[sp].[moe](T)[sp].[moe](T)[sp].[moe]([m5C])[sp].[ |
| | moe](T)[sp].[lna](T)[sp].[lna](G)}$$$$V2.0 |
| 424 | RNA1{[lna](G)[sp].[lna](G)[sp].[moe](T)[sp].[moe](T)[sp].[moe]([m5C]) |
| | [sp].[moe](T)[sp].[moe](G)[sp].[moe](A)[sp].[moe](A)[sp].[moe](G)[sp].[ |
| | moe](G)[sp].[moe](T)[sp].[moe](G)[sp].[moe](T)[sp].[moe](T)[sp].[moe]( |
| | [m5C])[sp].[lna](T)[sp].[lna](T)}$$$$V2.0 |
| 425 | RNA1{[lna]([m5C])[sp].[lna](G)[sp].[moe](G)[sp].[moe](T)[sp].[moe](T) |
| | [sp].[moe]([m5C])[sp].[moe](T)[sp].[moe](G)[sp].[moe](A)[sp].[moe](A)[ |
| | sp].[moe](G)[sp].[moe](G)[sp].[moe](T)[sp].[moe](G)[sp].[moe](T)[sp].[ |
| | moe](T)[sp].[lna]([m5C])[sp].[lna](T)}$$$$V2.0 |
| 426 | RNA1{[lna]([m5C])[sp].[lna]([m5C])[sp].[moe](G)[sp].[moe](G)[sp].[mo |
| | e](T)[sp].[moe](T)[sp].[moe]([m5C])[sp].[moe](T)[sp].[moe](G)[sp].[moe |
| | ](A)[sp].[moe](A)[sp].[moe](G)[sp].[moe](G)[sp].[moe](T)[sp].[moe](G)[ |
| | sp].[moe](T)[sp].[lna](T)[sp].[lna]([m5C])}$$$$V2.0 |
| 427 | RNA1{[lna](T)[sp].[lna]([m5C])[sp].[moe]([m5C])[sp].[moe](G)[sp].[mo |
| | e](G)[sp].[moe](T)[sp].[moe](T)[sp].[moe]([m5C])[sp].[moe](T)[sp].[moe |
| | ](G)[sp].[moe](A)[sp].[moe](A)[sp].[moe](G)[sp].[moe](G)[sp].[moe](T)[ |
| | sp].[moe](G)[sp].[lna](T)[sp].[lna](T)}$$$$V2.0 |
| 428 | RNA1{[lna]([m5C])[sp].[lna](T)[sp].[moe]([m5C])[sp].[moe]([m5C])[sp]. |
| | [moe](G)[sp].[moe](G)[sp].[moe](T)[sp].[moe](T)[sp].[moe]([m5C])[sp].[ |
| | moe](T)[sp].[moe](G)[sp].[moe](A)[sp].[moe](A)[sp].[moe](G)[sp].[moe] |
| | (G)[sp].[moe](T)[sp].[lna](G)[sp].[lna](T)}$$$$V2.0 |
| 429 | RNA1{[lna]([m5C])[sp].[lna]([m5C])[sp].[moe](T)[sp].[moe]([m5C])[sp]. |
| | [moe]([m5C])[sp].[moe](G)[sp].[moe](G)[sp].[moe](T)[sp].[moe](T)[sp].[ |
| | moe]([m5C])[sp].[moe](T)[sp].[moe](G)[sp].[moe](A)[sp].[moe](A)[sp].[ |
| | moe](G)[sp].[moe](G)[sp].[lna](T)[sp].[lna](G)}$$$$V2.0 |
| 430 | RNA1{[lna](G)[sp].[lna]([m5C])[sp].[moe]([m5C])[sp].[moe](T)[sp].[mo |
| | e]([m5C])[sp].[moe]([m5C])[sp].[moe](G)[sp].[moe](G)[sp].[moe](T)[sp]. |
| | [moe](T)[sp].[moe]([m5C])[sp].[moe](T)[sp].[moe](G)[sp].[moe](A)[sp].[ |
| | moe](A)[sp].[moe](G)[sp].[lna](G)[sp].[lna](T)}$$$$V2.0 |
| 431 | RNA1{[lna](T)[sp].[lna](G)[sp].[moe]([m5C])[sp].[moe]([m5C])[sp].[mo |
| | e](T)[sp].[moe]([m5C])[sp].[moe]([m5C])[sp].[moe](G)[sp].[moe](G)[sp]. |
| | [moe](T)[sp].[moe](T)[sp].[moe]([m5C])[sp].[moe](T)[sp].[moe](G)[sp].[ |
| | moe](A)[sp].[moe](A)[sp].[lna](G)[sp].[lna](G)}$$$$V2.0 |
| 432 | RNA1{[lna](T)[sp].[lna](T)[sp].[moe](G)[sp].[moe]([m5C])[sp].[moe]([m |
| | 5C])[sp].[moe](T)[sp].[moe]([m5C])[sp].[moe]([m5C])[sp].[moe](G)[sp].[ |
| | moe](G)[sp].[moe](T)[sp].[moe](T)[sp].[moe]([m5C])[sp].[moe](T)[sp].[ |
| | moe](G)[sp].[moe](A)[sp].[lna](A)[sp].[lna](G)}$$$$V2.0 |
| 433 | RNA1{[lna](G)[sp].[lna](T)[sp].[moe](T)[sp].[moe](G)[sp].[moe]([m5C]) |
| | [sp].[moe]([m5C])[sp].[moe](T)[sp].[moe]([m5C])[sp].[moe]([m5C])[sp].[ |
| | moe](G)[sp].[moe](G)[sp].[moe](T)[sp].[moe](T)[sp].[moe]([m5C])[sp].[ |
| | moe](T)[sp].[moe](G)[sp].[lna](A)[sp].[lna](A)}$$$$V2.0 |
| 434 | RNA1{[lna](T)[sp].[lna](G)[sp].[moe](T)[sp].[moe](T)[sp].[moe](G)[sp].[ |
| | moe]([m5C])[sp].[moe]([m5C])[sp].[moe](T)[sp].[moe]([m5C])[sp].[moe] |
| | ([m5C])[sp].[moe](G)[sp].[moe](G)[sp].[moe](T)[sp].[moe](T)[sp].[moe]( |
| | [m5C])[sp].[moe](T)[sp].[lna](G)[sp].[lna](A)}$$$$V2.0 |
| 435 | RNA1{[lna]([m5C])[sp].[lna](T)[sp].[moe](G)[sp].[moe](T)[sp].[moe](T)[ |
| | sp].[moe](G)[sp].[moe]([m5C])[sp].[moe]([m5C])[sp].[moe](T)[sp].[moe] |
| | ([m5C])[sp].[moe]([m5C])[sp].[moe](G)[sp].[moe](G)[sp].[moe](T)[sp].[ |
| | moe](T)[sp].[moe]([m5C])[sp].[lna](T)[sp].[lna](G)}$$$$V2.0 |
| 436 | RNA1{[lna](A)[sp].[lna]([m5C])[sp].[moe](T)[sp].[moe](G)[sp].[moe](T) |
| | [sp].[moe](T)[sp].[moe](G)[sp].[moe]([m5C])[sp].[moe]([m5C])[sp].[moe |
| | ](T)[sp].[moe]([m5C])[sp].[moe]([m5C])[sp].[moe](G)[sp].[moe](G)[sp].[ |
| | moe](T)[sp].[moe](T)[sp].[lna]([m5C])[sp].[lna](T)}$$$$V2.0 |
| 437 | RNA1{[lna](A)[sp].[lna](A)[sp].[moe]([m5C])[sp].[moe](T)[sp].[moe](G) |
| | [sp].[moe](T)[sp].[moe](T)[sp].[moe](G)[sp].[moe]([m5C])[sp].[moe]([m |
| | 5C])[sp].[moe](T)[sp].[moe]([m5C])[sp].[moe]([m5C])[sp].[moe](G)[sp].[ |
| | moe](G)[sp].[moe](T)[sp].[lna](T)[sp].[lna]([m5C])}$$$$V2.0 |
| 438 | RNA1{[lna]([m5C])[sp].[lna](A)[sp].[moe](A)[sp].[moe]([m5C])[sp].[mo |
| | e](T)[sp].[moe](G)[sp].[moe](T)[sp].[moe](T)[sp].[moe](G)[sp].[moe]([m |
| | 5C])[sp].[moe]([m5C])[sp].[moe](T)[sp].[moe]([m5C])[sp].[moe]([m5C])[ |
| | sp].[moe](G)[sp].[moe](G)[sp].[lna](T)[sp].[lna](T)}$$$$V2.0 |
| 439 | RNA1{[lna](T)[sp].[lna]([m5C])[sp].[moe](A)[sp].[moe](A)[sp].[moe]([m |
| | 5C])[sp].[moe](T)[sp].[moe](G)[sp].[moe](T)[sp].[moe](T)[sp].[moe](G)[ |
| | sp].[moe]([m5C])[sp].[moe]([m5C])[sp].[moe](T)[sp].[moe]([m5C])[sp].[ |
| | moe]([m5C])[sp].[moe](G)[sp].[lna](G)[sp].[lna](T)}$$$$V2.0 |
| 440 | RNA1{[lna](T)[sp].[lna](T)[sp].[moe]([m5C])[sp].[moe](A)[sp].[moe](A) |
| | [sp].[moe]([m5C])[sp].[moe](T)[sp].[moe](G)[sp].[moe](T)[sp].[moe](T)[ |
| | sp].[moe](G)[sp].[moe]([m5C])[sp].[moe]([m5C])[sp].[moe](T)[sp].[moe] |
| | ([m5C])[sp].[moe]([m5C])[sp].[lna](G)[sp].[lna](G)}$$$$V2.0 |
| 441 | RNA1{[lna](A)[sp].[lna](T)[sp].[moe](T)[sp].[moe]([m5C])[sp].[moe](A) |
| | [sp].[moe](A)[sp].[moe]([m5C])[sp].[moe](T)[sp].[moe](G)[sp].[moe](T)[ |
| | sp].[moe](T)[sp].[moe](G)[sp].[moe]([m5C])[sp].[moe]([m5C])[sp].[moe] |
| | (T)[sp].[moe]([m5C])[sp].[lna]([m5C])[sp].[lna](G)}$$$$V2.0 |
| 442 | RNA1{[lna]([m5C])[sp].[lna](A)[sp].[moe](T)[sp].[moe](T)[sp].[moe]([m |
| | 5C])[sp].[moe](A)[sp].[moe](A)[sp].[moe]([m5C])[sp].[moe](T)[sp].[moe |
| | ](G)[sp].[moe](T)[sp].[moe](T)[sp].[moe](G)[sp].[moe]([m5C])[sp].[moe] |
| | ([m5C])[sp].[moe](T)[sp].[lna]([m5C])[sp].[lna]([m5C])}$$$$V2.0 |
| 443 | RNA1{[lna](T)[sp].[lna]([m5C])[sp].[moe](A)[sp].[moe](T)[sp].[moe](T)[ |
| | sp].[moe]([m5C])[sp].[moe](A)[sp].[moe](A)[sp].[moe]([m5C])[sp].[moe] |
| | (T)[sp].[moe](G)[sp].[moe](T)[sp].[moe](T)[sp].[moe](G)[sp].[moe]([m5 |
| | C])[sp].[moe]([m5C])[sp].[lna](T)[sp].[lna]([m5C])}$$$$V2.0 |
| 444 | RNA1{[lna](T)[sp].[lna](T)[sp].[moe]([m5C])[sp].[moe](A)[sp].[moe](T)[ |
| | sp].[moe](T)[sp].[moe]([m5C])[sp].[moe](A)[sp].[moe](A)[sp].[moe]([m5 |
| | C])[sp].[moe](T)[sp].[moe](G)[sp].[moe](T)[sp].[moe](T)[sp].[moe](G)[s |
| | p].[moe]([m5C])[sp].[lna]([m5C])[sp].[lna](T)}$$$$V2.0 |
| 445 | RNA1{[lna](T)[sp].[lna](T)[sp].[moe](T)[sp].[moe]([m5C])[sp].[moe](A)[ |
| | sp].[moe](T)[sp].[moe](T)[sp].[moe]([m5C])[sp].[moe](A)[sp].[moe](A)[s |
| | p].[moe]([m5C])[sp].[moe](T)[sp].[moe](G)[sp].[moe](T)[sp].[moe](T)[sp |
| | ].[moe](G)[sp].[lna]([m5C])[sp].[lna]([m5C])}$$$$V2.0 |
| 446 | RNA1{[lna](A)[sp].[lna](T)[sp].[moe](T)[sp].[moe](T)[sp].[moe]([m5C])[ |
| | sp].[moe](A)[sp].[moe](T)[sp].[moe](T)[sp].[moe]([m5C])[sp].[moe](A)[s |
| | p].[moe](A)[sp].[moe]([m5C])[sp].[moe](T)[sp].[moe](G)[sp].[moe](T)[sp |
| | ].[moe](T)[sp].[lna](G)[sp].[lna]([m5C])}$$$$V2.0 |
| 447 | RNA1{[lna]([m5C])[sp].[lna](A)[sp].[moe](T)[sp].[moe](T)[sp].[moe](T)[ |
| | sp].[moe]([m5C])[sp].[moe](A)[sp].[moe](T)[sp].[moe](T)[sp].[moe]([m5 |
| | C])[sp].[moe](A)[sp].[moe](A)[sp].[moe]([m5C])[sp].[moe](T)[sp].[moe]( |
| | G)[sp].[moe](T)[sp].[lna](T)[sp].[lna](G)}$$$$V2.0 |
| 448 | RNA1{[lna](A)[sp].[lna]([m5C])[sp].[moe](A)[sp].[moe](T)[sp].[moe](T) |
| | [sp].[moe](T)[sp].[moe]([m5C])[sp].[moe](A)[sp].[moe](T)[sp].[moe](T)[ |
| | sp].[moe]([m5C])[sp].[moe](A)[sp].[moe](A)[sp].[moe]([m5C])[sp].[moe] |
| | (T)[sp].[moe](G)[sp].[lna](T)[sp].[lna](T)}$$$$V2.0 |
| 449 | RNA1{[moe](G)[sp].[moe](G)[sp].[moe](T)[sp].[moe](G)[sp].[moe](T)[s |
| | p].[moe](T)[sp].[moe]([m5C])[sp].[moe](T)[sp].[moe](T)[sp].[moe](G)[sp |
| | ].[moe](T)[sp].[moe](A)[sp].[moe]([m5C])[sp].[moe](T)}$$$$V2.0 |
| 450 | RNA1{[moe](T)[sp].[moe](T)[sp].[moe]([m5C])[sp].[moe](T)[sp].[moe]( |
| | T)[sp].[moe](G)[sp].[moe](T)[sp].[moe](A)[sp].[moe]([m5C])[sp].[moe]( |
| | T)[sp].[moe](T)[sp].[moe]([m5C])[sp].[moe](A)[sp].[moe](T)}$$$$V2.0 |
| 451 | RNA1{[moe](T)[sp].[moe](G)[sp].[moe](T)[sp].[moe](T)[sp].[moe]([m5C |
| | ])[sp].[moe](T)[sp].[moe](T)[sp].[moe](G)[sp].[moe](T)[sp].[moe](A)[sp]. |
| | [moe]([m5C])[sp].[moe](T)[sp].[moe](T)[sp].[moe]([m5C])}$$$$V2.0 |
| 452 | RNA1{[moe](G)[sp].[moe](G)[sp].[moe](T)[sp].[moe](G)[sp].[moe](T)[s |
| | p].[moe](T)[sp].[moe]([m5C])[sp].[moe](T)[sp].[moe](T)[sp].[moe](G)[sp |
| | ].[moe](T)[sp].[moe](A)[sp].[moe]([m5C])[sp].[moe](T)[sp].[moe](T)[sp]. |
| | [moe]([m5C])}$$$$V2.0 |
| 453 | RNA1{[moe](T)[sp].[moe](G)[sp].[moe](T)[sp].[moe](T)[sp].[moe]([m5C |
| | ])[sp].[moe](T)[sp].[moe](T)[sp].[moe](G)[sp].[moe](T)[sp].[moe](A)[sp]. |
| | [moe]([m5C])[sp].[moe](T)[sp].[moe](T)[sp].[moe]([m5C])[sp].[moe](A)[ |
| | sp].[moe](T)}$$$$V2.0 |
| 454 | RNA1{[moe](G)[sp].[moe](T)[sp].[moe](G)[sp].[moe](T)[sp].[moe](T)[sp |
| | ].[moe]([m5C])[sp].[moe](T)[sp].[moe](T)[sp].[moe](G)[sp].[moe](T)[sp]. |
| | [moe](A)[sp].[moe]([m5C])[sp].[moe](T)[sp].[moe](T)[sp].[moe]([m5C])[ |
| | sp].[moe](A)}$$$$V2.0 |
| 455 | RNA1{[moe](G)[sp].[moe](G)[sp].[moe](T)[sp].[moe](G)[sp].[moe](T)[s |
| | p].[moe](T)[sp].[moe]([m5C])[sp].[moe](T)[sp].[moe](T)[sp].[moe](G)[sp |
| | ].[moe](T)[sp].[moe](A)[sp].[moe]([m5C])[sp].[moe](T)[sp].[moe](T)[sp]. |
| | [moe]([m5C])[sp].[moe](A)[sp].[moe](T)[sp].[moe]([m5C])[sp].[moe]([m |
| | 5C])}$$$$V2.0 |
| 456 | RNA1{[moe](A)[sp].[moe](A)[sp].[moe](G)[sp].[moe](G)[sp].[moe](T)[s |
| | p].[moe](G)[sp].[moe](T)[sp].[moe](T)[sp].[moe]([m5C])[sp].[moe](T)[sp |
| | ].[moe](T)[sp].[moe](G)[sp].[moe](T)[sp].[moe](A)[sp].[moe]([m5C])[sp] |
| | .[moe](T)[sp].[moe](T)[sp].[moe]([m5C])[sp].[moe](A)[sp].[moe](T)}$$$ |
| | $V2.0 |
| 457 | RNA1{[moe](A)[sp].[moe](G)[sp].[moe](G)[sp].[moe](T)[sp].[moe](G)[s |
| | p].[moe](T)[sp].[moe](T)[sp].[moe]([m5C])[sp].[moe](T)[sp].[moe](T)[sp |
| | ].[moe](G)[sp].[moe](T)[sp].[moe](A)[sp].[moe]([m5C])[sp].[moe](T)[sp] |
| | .[moe](T)[sp].[moe]([m5C])[sp].[moe](A)[sp].[moe](T)[sp].[moe]([m5C]) |
| | }$$$$V2.0 |
| 458 | RNA1{[lna](G)[sp].[lna](G)[sp].[moe](T)[sp].[moe](G)[sp].[moe](T)[sp].[ |
| | moe](T)[sp].[moe]([m5C])[sp].[moe](T)[sp].[moe](T)[sp].[moe](G)[sp].[ |
| | moe](T)[sp].[moe](A)[sp].[lna]([m5C])[sp].[lna](T)}$$$$V2.0 |
| 459 | RNA1{[lna](T)[sp].[lna](T)[sp].[moe]([m5C])[sp].[moe](T)[sp].[moe](T)[ |
| | sp].[moe](G)[sp].[moe](T)[sp].[moe](A)[sp].[moe]([m5C])[sp].[moe](T)[s |
| | p].[moe](T)[sp].[moe]([m5C])[sp].[lna](A)[sp].[lna](T)}$$$$V2.0 |
| 460 | RNA1{[lna](T)[sp].[lna](G)[sp].[moe](T)[sp].[moe](T)[sp].[moe]([m5C])[ |
| | sp].[moe](T)[sp].[moe](T)[sp].[moe](G)[sp].[moe](T)[sp].[moe](A)[sp].[ |
| | moe]([m5C])[sp].[moe](T)[sp].[lna](T)[sp].[lna]([m5C])}$$$$V2.0 |
| 461 | RNA1{[lna](G)[sp].[lna](G)[sp].[moe](T)[sp].[moe](G)[sp].[moe](T)[sp].[ |
| | moe](T)[sp].[moe]([m5C])[sp].[moe](T)[sp].[moe](T)[sp].[moe](G)[sp].[ |
| | moe](T)[sp].[moe](A)[sp].[moe]([m5C])[sp].[moe](T)[sp].[lna](T)[sp].[ln |
| | a]([m5C])}$$$$V2.0 |
| 462 | RNA1{[lna](T)[sp].[lna](G)[sp].[moe](T)[sp].[moe](T)[sp].[moe]([m5C])[ |
| | sp].[moe](T)[sp].[moe](T)[sp].[moe](G)[sp].[moe](T)[sp].[moe](A)[sp].[ |
| | moe]([m5C])[sp].[moe](T)[sp].[moe](T)[sp].[moe]([m5C])[sp].[lna](A)[sp |
| | ].[lna](T)}$$$$V2.0 |
| 463 | RNA1{[lna](G)[sp].[lna](T)[sp].[moe](G)[sp].[moe](T)[sp].[moe](T)[sp].[ |
| | moe]([m5C])[sp].[moe](T)[sp].[moe](T)[sp].[moe](G)[sp].[moe](T)[sp].[ |
| | moe](A)[sp].[moe]([m5C])[sp].[moe](T)[sp].[moe](T)[sp].[lna]([m5C])[sp |
| | ].[lna](A)}$$$$V2.0 |
| 464 | RNA1{[lna](G)[sp].[lna](G)[sp].[moe](T)[sp].[moe](G)[sp].[moe](T)[sp].[ |
| | moe](T)[sp].[moe]([m5C])[sp].[moe](T)[sp].[moe](T)[sp].[moe](G)[sp].[ |
| | moe](T)[sp].[moe](A)[sp].[moe]([m5C])[sp].[moe](T)[sp].[moe](T)[sp].[ |
| | moe]([m5C])[sp].[moe](A)[sp].[moe](T)[sp].[lna]([m5C])[sp].[lna]([m5C] |
| | )}$$$$V2.0 |
| 465 | RNA1{[lna](A)[sp].[lna](A)[sp].[moe](G)[sp].[moe](G)[sp].[moe](T)[sp]. |
| | [moe](G)[sp].[moe](T)[sp].[moe](T)[sp].[moe]([m5C])[sp].[moe](T)[sp].[ |
| | moe](T)[sp].[moe](G)[sp].[moe](T)[sp].[moe](A)[sp].[moe]([m5C])[sp].[ |
| | moe](T)[sp].[moe](T)[sp].[moe]([m5C])[sp].[lna](A)[sp].[lna](T)}$$$$V2 |
| | .0 |
| 466 | RNA1{[lna](A)[sp].[lna](G)[sp].[moe](G)[sp].[moe](T)[sp].[moe](G)[sp]. |
| | [moe](T)[sp].[moe](T)[sp].[moe]([m5C])[sp].[moe](T)[sp].[moe](T)[sp].[ |
| | moe](G)[sp].[moe](T)[sp].[moe](A)[sp].[moe]([m5C])[sp].[moe](T)[sp].[ |
| | moe](T)[sp].[moe]([m5C])[sp].[moe](A)[sp].[lna](T)[sp].[lna]([m5C])}$$ |
| | $$V2.0 |
| 467 | RNA1{[moe](T)[sp].[moe](T)[sp].[moe]([m5C])[sp].[moe](T)[sp].[moe]( |
| | G)[sp].[moe](A)[sp].[moe](A)[sp].[moe](G)[sp].[moe](G)[sp].[moe](T)[sp |
| | ].[moe](G)[sp].[moe](T)[sp].[moe](T)[sp].[moe]([m5C])[sp].[moe](T)[sp]. |
| | [moe](T)[sp].[moe](G)[sp].[moe](T)}$$$$V2.0 |
| 468 | RNA1{[moe](G)[sp].[moe](T)[sp].[moe](T)[sp].[moe]([m5C])[sp].[moe]( |
| | T)[sp].[moe](G)[sp].[moe](A)[sp].[moe](A)[sp].[moe](G)[sp].[moe](G)[sp |
| | ].[moe](T)[sp].[moe](G)[sp].[moe](T)[sp].[moe](T)[sp].[moe]([m5C])[sp]. |
| | [moe](T)[sp].[moe](T)[sp].[moe](G)}$$$$V2.0 |
| 469 | RNA1{[moe](G)[sp].[moe](G)[sp].[moe](T)[sp].[moe](T)[sp].[moe]([m5 |
| | C])[sp].[moe](T)[sp].[moe](G)[sp].[moe](A)[sp].[moe](A)[sp].[moe](G)[s |
| | p].[moe](G)[sp].[moe](T)[sp].[moe](G)[sp].[moe](T)[sp].[moe](T)[sp].[m |
| | oe]([m5C])[sp].[moe](T)[sp].[moe](T)}$$$$V2.0 |
| 470 | RNA1{[moe]([m5C])[sp].[moe]([m5C])[sp].[moe](G)[sp].[moe](G)[sp].[ |
| | moe](T)[sp].[moe](T)[sp].[moe]([m5C])[sp].[moe](T)[sp].[moe](G)[sp].[ |
| | moe](A)[sp].[moe](A)[sp].[moe](G)[sp].[moe](G)[sp].[moe](T)[sp].[moe] |
| | (G)[sp].[moe](T)[sp].[moe](T)[sp].[moe]([m5C])}$$$$V2.0 |
| 471 | RNA1{[moe](T)[sp].[moe]([m5C])[sp].[moe]([m5C])[sp].[moe](G)[sp].[ |
| | moe](G)[sp].[moe](T)[sp].[moe](T)[sp].[moe]([m5C])[sp].[moe](T)[sp].[ |
| | moe](G)[sp].[moe](A)[sp].[moe](A)[sp].[moe](G)[sp].[moe](G)[sp].[moe] |
| | (T)[sp].[moe](G)[sp].[moe](T)[sp].[moe](T)}$$$$V2.0 |
| 472 | RNA1{[moe]([m5C])[sp].[moe](T)[sp].[moe]([m5C])[sp].[moe]([m5C])[s |
| | p].[moe](G)[sp].[moe](G)[sp].[moe](T)[sp].[moe](T)[sp].[moe]([m5C])[sp |
| | ].[moe](T)[sp].[moe](G)[sp].[moe](A)[sp].[moe](A)[sp].[moe](G)[sp].[mo |
| | e](G)[sp].[moe](T)[sp].[moe](G)[sp].[moe](T)}$$$$V2.0 |
| 473 | RNA1{[moe]([m5C])[sp].[moe]([m5C])[sp].[moe](T)[sp].[moe]([m5C])[s |
| | p].[moe]([m5C])[sp].[moe](G)[sp].[moe](G)[sp].[moe](T)[sp].[moe](T)[sp |
| | ].[moe]([m5C])[sp].[moe](T)[sp].[moe](G)[sp].[moe](A)[sp].[moe](A)[sp] |
| | .[moe](G)[sp].[moe](G)[sp].[moe](T)[sp].[moe](G)}$$$$V2.0 |
| 474 | RNA1{[moe](A)[sp].[moe](T)[sp].[moe](T)[sp].[moe]([m5C])[sp].[moe]( |
| | A)[sp].[moe](A)[sp].[moe]([m5C])[sp].[moe](T)[sp].[moe](G)[sp].[moe]( |
| | T)[sp].[moe](T)[sp].[moe](G)[sp].[moe]([m5C])[sp].[moe]([m5C])[sp].[m |
| | oe](T)[sp].[moe]([m5C])[sp].[moe]([m5C])[sp].[moe](G)}$$$$V2.0 |
| 475 | RNA1{[moe]([m5C])[sp].[moe](A)[sp].[moe](T)[sp].[moe](T)[sp].[moe]( |
| | [m5C])[sp].[moe](A)[sp].[moe](A)[sp].[moe]([m5C])[sp].[moe](T)[sp].[m |
| | oe](G)[sp].[moe](T)[sp].[moe](T)[sp].[moe](G)[sp].[moe]([m5C])[sp].[mo |
| | e]([m5C])[sp].[moe](T)[sp].[moe]([m5C])[sp].[moe]([m5C])}$$$$V2.0 |
| 476 | RNA1{[moe](T)[sp].[moe]([m5C])[sp].[moe](A)[sp].[moe](T)[sp].[moe]( |
| | T)[sp].[moe]([m5C])[sp].[moe](A)[sp].[moe](A)[sp].[moe]([m5C])[sp].[m |
| | oe](T)[sp].[moe](G)[sp].[moe](T)[sp].[moe](T)[sp].[moe](G)[sp].[moe]([ |
| | m5C])[sp].[moe]([m5C])[sp].[moe](T)[sp].[moe]([m5C])}$$$$V2.0 |
| 477 | RNA1{[moe](T)[sp].[moe](T)[sp].[moe]([m5C])[sp].[moe](A)[sp].[moe]( |
| | T)[sp].[moe](T)[sp].[moe]([m5C])[sp].[moe](A)[sp].[moe](A)[sp].[moe]([ |
| | m5C])[sp].[moe](T)[sp].[moe](G)[sp].[moe](T)[sp].[moe](T)[sp].[moe](G |
| | )[sp].[moe]([m5C])[sp].[moe]([m5C])[sp].[moe](T)}$$$$V2.0 |
| 478 | RNA1{[moe](A)[sp].[moe](T)[sp].[moe](T)[sp].[moe](T)[sp].[moe]([m5C |
| | ])[sp].[moe](A)[sp].[moe](T)[sp].[moe](T)[sp].[moe]([m5C])[sp].[moe](A |
| | )[sp].[moe](A)[sp].[moe]([m5C])[sp].[moe](T)[sp].[moe](G)[sp].[moe](T) |
| | [sp].[moe](T)[sp].[moe](G)[sp].[moe]([m5C])}$$$$V2.0 |
| 479 | RNA1{[moe]([m5C])[sp].[moe](A)[sp].[moe](T)[sp].[moe](T)[sp].[moe]( |
| | T)[sp].[moe]([m5C])[sp].[moe](A)[sp].[moe](T)[sp].[moe](T)[sp].[moe]([ |
| | m5C])[sp].[moe](A)[sp].[moe](A)[sp].[moe]([m5C])[sp].[moe](T)[sp].[m |
| | oe](G)[sp].[moe](T)[sp].[moe](T)[sp].[moe](G)}$$$$V2.0 |
| 480 | RNA1{[moe](A)[sp].[moe]([m5C])[sp].[moe](A)[sp].[moe](T)[sp].[moe]( |
| | T)[sp].[moe](T)[sp].[moe]([m5C])[sp].[moe](A)[sp].[moe](T)[sp].[moe](T |
| | )[sp].[moe]([m5C])[sp].[moe](A)[sp].[moe](A)[sp].[moe]([m5C])[sp].[mo |
| | e](T)[sp].[moe](G)[sp].[moe](T)[sp].[moe](T)}$$$$V2.0 |
| 481 | RNA1{[moe](A)[sp].[moe](A)[sp].[moe]([m5C])[sp].[moe](A)[sp].[moe]( |
| | T)[sp].[moe](T)[sp].[moe](T)[sp].[moe]([m5C])[sp].[moe](A)[sp].[moe](T |
| | )[sp].[moe](T)[sp].[moe]([m5C])[sp].[moe](A)[sp].[moe](A)[sp].[moe]([m |
| | 5C])[sp].[moe](T)[sp].[moe](G)[sp].[moe](T)}$$$$V2.0 |
| 482 | RNA1{[moe](T)[sp].[moe](T)[sp].[moe](A)[sp].[moe](A)[sp].[moe]([m5 |
| | C])[sp].[moe](A)[sp].[moe](T)[sp].[moe](T)[sp].[moe](T)[sp].[moe]([m5 |
| | C])[sp].[moe](A)[sp].[moe](T)[sp].[moe](T)[sp].[moe]([m5C])[sp].[moe]( |
| | A)[sp].[moe](A)[sp].[moe]([m5C])[sp].[moe](T)}$$$$V2.0 |
| 483 | RNA1{[moe](T)[sp].[moe](T)[sp].[moe](T)[sp].[moe](A)[sp].[moe](A)[sp |
| | ].[moe]([m5C])[sp].[moe](A)[sp].[moe](T)[sp].[moe](T)[sp].[moe](T)[sp]. |
| | [moe]([m5C])[sp].[moe](A)[sp].[moe](T)[sp].[moe](T)[sp].[moe]([m5C])[ |
| | sp].[moe](A)[sp].[moe](A)[sp].[moe]([m5C])}$$$$V2.0 |
| 484 | RNA1{[moe]([m5C])[sp].[moe](T)[sp].[moe](T)[sp].[moe](T)[sp].[moe]( |
| | A)[sp].[moe](A)[sp].[moe]([m5C])[sp].[moe](A)[sp].[moe](T)[sp].[moe]( |
| | T)[sp].[moe](T)[sp].[moe]([m5C])[sp].[moe](A)[sp].[moe](T)[sp].[moe](T |
| | )[sp].[moe]([m5C])[sp].[moe](A)[sp].[moe](A)}$$$$V2.0 |
| 485 | RNA1{[moe]([m5C])[sp].[moe]([m5C])[sp].[moe](T)[sp].[moe](T)[sp].[m |
| | oe](T)[sp].[moe](A)[sp].[moe](A)[sp].[moe]([m5C])[sp].[moe](A)[sp].[m |
| | oe](T)[sp].[moe](T)[sp].[moe](T)[sp].[moe]([m5C])[sp].[moe](A)[sp].[mo |
| | e](T)[sp].[moe](T)[sp].[moe]([m5C])[sp].[moe](A)}$$$$V2.0 |
| 486 | RNA1{[moe](A)[sp].[moe](T)[sp].[moe](T)[sp].[moe](G)[sp].[moe](T)[sp |
| | ].[moe](G)[sp].[moe](T)[sp].[moe](T)[sp].[moe](G)[sp].[moe](A)[sp].[mo |
| | e](A)[sp].[moe](T)[sp].[moe]([m5C])[sp].[moe]([m5C])[sp].[moe](T)[sp]. |
| | [moe](T)[sp].[moe](T)[sp].[moe](A)}$$$$V2.0 |
| 487 | RNA1{[moe]([m5C])[sp].[moe](A)[sp].[moe](T)[sp].[moe](T)[sp].[moe]( |
| | G)[sp].[moe](T)[sp].[moe](G)[sp].[moe](T)[sp].[moe](T)[sp].[moe](G)[sp |
| | ].[moe](A)[sp].[moe](A)[sp].[moe](T)[sp].[moe]([m5C])[sp].[moe]([m5C] |
| | )[sp].[moe](T)[sp].[moe](T)[sp].[moe](T)}$$$$V2.0 |
| 488 | RNA1{[moe]([m5C])[sp].[moe]([m5C])[sp].[moe](A)[sp].[moe](T)[sp].[ |
| | moe](T)[sp].[moe](G)[sp].[moe](T)[sp].[moe](G)[sp].[moe](T)[sp].[moe]( |
| | T)[sp].[moe](G)[sp].[moe](A)[sp].[moe](A)[sp].[moe](T)[sp].[moe]([m5C |
| | ])[sp].[moe]([m5C])[sp].[moe](T)[sp].[moe](T)}$$$$V2.0 |
| 489 | RNA1{[moe](G)[sp].[moe]([m5C])[sp].[moe]([m5C])[sp].[moe](A)[sp].[ |
| | moe](T)[sp].[moe](T)[sp].[moe](G)[sp].[moe](T)[sp].[moe](G)[sp].[moe]( |
| | T)[sp].[moe](T)[sp].[moe](G)[sp].[moe](A)[sp].[moe](A)[sp].[moe](T)[sp |
| | ].[moe]([m5C])[sp].[moe]([m5C])[sp].[moe](T)}$$$$V2.0 |
| 490 | RNA1{[moe]([m5C])[sp].[moe](A)[sp].[moe](G)[sp].[moe]([m5C])[sp].[ |
| | moe]([m5C])[sp].[moe](A)[sp].[moe](T)[sp].[moe](T)[sp].[moe](G)[sp].[ |
| | moe](T)[sp].[moe](G)[sp].[moe](T)[sp].[moe](T)[sp].[moe](G)[sp].[moe]( |
| | A)[sp].[moe](A)[sp].[moe](T)[sp].[moe]([m5C])}$$$$V2.0 |
| 491 | RNA1{[moe]([m5C])[sp].[moe]([m5C])[sp].[moe](A)[sp].[moe](G)[sp].[ |
| | moe]([m5C])[sp].[moe]([m5C])[sp].[moe](A)[sp].[moe](T)[sp].[moe](T)[s |
| | p].[moe](G)[sp].[moe](T)[sp].[moe](G)[sp].[moe](T)[sp].[moe](T)[sp].[m |
| | oe](G)[sp].[moe](A)[sp].[moe](A)[sp].[moe](T)}$$$$V2.0 |
| 492 | RNA1{[moe](T)[sp].[moe]([m5C])[sp].[moe]([m5C])[sp].[moe](A)[sp].[ |
| | moe](G)[sp].[moe]([m5C])[sp].[moe]([m5C])[sp].[moe](A)[sp].[moe](T)[ |
| | sp].[moe](T)[sp].[moe](G)[sp].[moe](T)[sp].[moe](G)[sp].[moe](T)[sp].[ |
| | moe](T)[sp].[moe](G)[sp].[moe](A)[sp].[moe](A)}$$$$V2.0 |
| 493 | RNA1{[moe](T)[sp].[moe](T)[sp].[moe]([m5C])[sp].[moe]([m5C])[sp].[m |
| | oe](A)[sp].[moe](G)[sp].[moe]([m5C])[sp].[moe]([m5C])[sp].[moe](A)[sp |
| | ].[moe](T)[sp].[moe](T)[sp].[moe](G)[sp].[moe](T)[sp].[moe](G)[sp].[mo |
| | e](T)[sp].[moe](T)[sp].[moe](G)[sp].[moe](A)}$$$$V2.0 |
| 494 | RNA1{[moe](G)[sp].[moe]([m5C])[sp].[moe](T)[sp].[moe](T)[sp].[moe]( |
| | [m5C])[sp].[moe]([m5C])[sp].[moe](A)[sp].[moe](G)[sp].[moe]([m5C])[s |
| | p].[moe]([m5C])[sp].[moe](A)[sp].[moe](T)[sp].[moe](T)[sp].[moe](G)[sp |
| | ].[moe](T)[sp].[moe](G)[sp].[moe](T)[sp].[moe](T)}$$$$V2.0 |
| 495 | RNA1{[moe](A)[sp].[moe](G)[sp].[moe]([m5C])[sp].[moe](T)[sp].[moe]( |
| | T)[sp].[moe]([m5C])[sp].[moe]([m5C])[sp].[moe](A)[sp].[moe](G)[sp].[m |
| | oe]([m5C])[sp].[moe]([m5C])[sp].[moe](A)[sp].[moe](T)[sp].[moe](T)[sp] |
| | .[moe](G)[sp].[moe](T)[sp].[moe](G)[sp].[moe](T)}$$$$V2.0 |
| 496 | RNA1{[moe](T)[sp].[moe](A)[sp].[moe](G)[sp].[moe]([m5C])[sp].[moe]( |
| | T)[sp].[moe](T)[sp].[moe]([m5C])[sp].[moe]([m5C])[sp].[moe](A)[sp].[m |
| | oe](G)[sp].[moe]([m5C])[sp].[moe]([m5C])[sp].[moe](A)[sp].[moe](T)[sp |
| | ].[moe](T)[sp].[moe](G)[sp].[moe](T)[sp].[moe](G)}$$$$V2.0 |
| 497 | RNA1{[moe](T)[sp].[moe](T)[sp].[moe](A)[sp].[moe](G)[sp].[moe]([m5 |
| | C])[sp].[moe](T)[sp].[moe](T)[sp].[moe]([m5C])[sp].[moe]([m5C])[sp].[ |
| | moe](A)[sp].[moe](G)[sp].[moe]([m5C])[sp].[moe]([m5C])[sp].[moe](A)[ |
| | sp].[moe](T)[sp].[moe](T)[sp].[moe](G)[sp].[moe](T)}$$$$V2.0 |
| 498 | RNA1{[moe]([m5C])[sp].[moe]([m5C])[sp].[moe](T)[sp].[moe](T)[sp].[m |
| | oe](A)[sp].[moe](G)[sp].[moe]([m5C])[sp].[moe](T)[sp].[moe](T)[sp].[mo |
| | e]([m5C])[sp].[moe]([m5C])[sp].[moe](A)[sp].[moe](G)[sp].[moe]([m5C] |
| | )[sp].[moe]([m5C])[sp].[moe](A)[sp].[moe](T)[sp].[moe](T)}$$$$V2.0 |
| 499 | RNA1{[moe](T)[sp].[moe]([m5C])[sp].[moe]([m5C])[sp].[moe](T)[sp].[m |
| | oe](T)[sp].[moe](A)[sp].[moe](G)[sp].[moe]([m5C])[sp].[moe](T)[sp].[mo |
| | e](T)[sp].[moe]([m5C])[sp].[moe]([m5C])[sp].[moe](A)[sp].[moe](G)[sp]. |
| | [moe]([m5C])[sp].[moe]([m5C])[sp].[moe](A)[sp].[moe](T)}$$$$V2.0 |
| 500 | RNA1{[moe](T)[sp].[moe](T)[sp].[moe]([m5C])[sp].[moe]([m5C])[sp].[m |
| | oe](T)[sp].[moe](T)[sp].[moe](A)[sp].[moe](G)[sp].[moe]([m5C])[sp].[mo |
| | e](T)[sp].[moe](T)[sp].[moe]([m5C])[sp].[moe]([m5C])[sp].[moe](A)[sp]. |
| | [moe](G)[sp].[moe]([m5C])[sp].[moe]([m5C])[sp].[moe](A)}$$$$V2.0 |
| 501 | RNA1{[moe]([m5C])[sp].[moe](T)[sp].[moe](T)[sp].[moe]([m5C])[sp].[m |
| | oe]([m5C])[sp].[moe](T)[sp].[moe](T)[sp].[moe](A)[sp].[moe](G)[sp].[mo |
| | e]([m5C])[sp].[moe](T)[sp].[moe](T)[sp].[moe]([m5C])[sp].[moe]([m5C]) |
| | [sp].[moe](A)[sp].[moe](G)[sp].[moe]([m5C])[sp].[moe]([m5C])}$$$$V2. |
| | 0 |
| 502 | RNA1{[moe](T)[sp].[moe](T)[sp].[moe]([m5C])[sp].[moe](T)[sp].[moe]( |
| | T)[sp].[moe]([m5C])[sp].[moe]([m5C])[sp].[moe](T)[sp].[moe](T)[sp].[m |
| | oe](A)[sp].[moe](G)[sp].[moe]([m5C])[sp].[moe](T)[sp].[moe](T)[sp].[mo |
| | e]([m5C])[sp].[moe]([m5C])[sp].[moe](A)[sp].[moe](G)}$$$$V2.0 |
| 503 | RNA1{[moe]([m5C])[sp].[moe](T)[sp].[moe](T)[sp].[moe]([m5C])[sp].[m |
| | oe](T)[sp].[moe](T)[sp].[moe]([m5C])[sp].[moe]([m5C])[sp].[moe](T)[sp] |
| | .[moe](T)[sp].[moe](A)[sp].[moe](G)[sp].[moe]([m5C])[sp].[moe](T)[sp]. |
| | [moe](T)[sp].[moe]([m5C])[sp].[moe]([m5C])[sp].[moe](A)}$$$$V2.0 |
| 504 | RNA1{[moe](G)[sp].[moe]([m5C])[sp].[moe](T)[sp].[moe](T)[sp].[moe]( |
| | [m5C])[sp].[moe](T)[sp].[moe](T)[sp].[moe]([m5C])[sp].[moe]([m5C])[sp |
| | ].[moe](T)[sp].[moe](T)[sp].[moe](A)[sp].[moe](G)[sp].[moe]([m5C])[sp] |
| | .[moe](T)[sp].[moe](T)[sp].[moe]([m5C])[sp].[moe]([m5C])}$$$$V2.0 |
| 505 | RNA1{[moe](A)[sp].[moe](G)[sp].[moe]([m5C])[sp].[moe](T)[sp].[moe]( |
| | T)[sp].[moe]([m5C])[sp].[moe](T)[sp].[moe](T)[sp].[moe]([m5C])[sp].[m |
| | oe]([m5C])[sp].[moe](T)[sp].[moe](T)[sp].[moe](A)[sp].[moe](G)[sp].[mo |
| | e]([m5C])[sp].[moe](T)[sp].[moe](T)[sp].[moe]([m5C])}$$$$V2.0 |
| 506 | RNA1{[moe](G)[sp].[moe](T)[sp].[moe](T)[sp].[moe](T)[sp].[moe]([m5C |
| | ])[sp].[moe](T)[sp].[moe](G)[sp].[moe](T)[sp].[moe](G)[sp].[moe](A)[sp] |
| | .[moe](T)[sp].[moe](T)[sp].[moe](T)[sp].[moe](T)[sp].[moe]([m5C])[sp].[ |
| | moe](T)[sp].[moe](T)[sp].[moe](T)}$$$$V2.0 |
| 507 | RNA1{[moe](G)[sp].[moe](G)[sp].[moe](T)[sp].[moe](T)[sp].[moe](T)[sp |
| | ].[moe]([m5C])[sp].[moe](T)[sp].[moe](G)[sp].[moe](T)[sp].[moe](G)[sp] |
| | .[moe](A)[sp].[moe](T)[sp].[moe](T)[sp].[moe](T)[sp].[moe](T)[sp].[moe] |
| | ([m5C])[sp].[moe](T)[sp].[moe](T)}$$$$V2.0 |
| 508 | RNA1{[moe](T)[sp].[moe](G)[sp].[moe](G)[sp].[moe](T)[sp].[moe](T)[sp |
| | ].[moe](T)[sp].[moe]([m5C])[sp].[moe](T)[sp].[moe](G)[sp].[moe](T)[sp]. |
| | [moe](G)[sp].[moe](A)[sp].[moe](T)[sp].[moe](T)[sp].[moe](T)[sp].[moe] |
| | (T)[sp].[moe]([m5C])[sp].[moe](T)}$$$$V2.0 |
| 509 | RNA1{[moe](T)[sp].[moe](T)[sp].[moe](G)[sp].[moe](G)[sp].[moe](T)[sp |
| | ].[moe](T)[sp].[moe](T)[sp].[moe]([m5C])[sp].[moe](T)[sp].[moe](G)[sp]. |
| | [moe](T)[sp].[moe](G)[sp].[moe](A)[sp].[moe](T)[sp].[moe](T)[sp].[moe] |
| | (T)[sp].[moe](T)[sp].[moe]([m5C])}$$$$V2.0 |
| 510 | RNA1{[moe]([m5C])[sp].[moe]([m5C])[sp].[moe](T)[sp].[moe](T)[sp].[m |
| | oe](G)[sp].[moe](G)[sp].[moe](T)[sp].[moe](T)[sp].[moe](T)[sp].[moe]([ |
| | m5C])[sp].[moe](T)[sp].[moe](G)[sp].[moe](T)[sp].[moe](G)[sp].[moe](A |
| | )[sp].[moe](T)[sp].[moe](T)[sp].[moe](T)}$$$$V2.0 |
| 511 | RNA1{[moe](A)[sp].[moe]([m5C])[sp].[moe]([m5C])[sp].[moe](T)[sp].[ |
| | moe](T)[sp].[moe](G)[sp].[moe](G)[sp].[moe](T)[sp].[moe](T)[sp].[moe]( |
| | T)[sp].[moe]([m5C])[sp].[moe](T)[sp].[moe](G)[sp].[moe](T)[sp].[moe]( |
| | G)[sp].[moe](A)[sp].[moe](T)[sp].[moe](T)}$$$$V2.0 |
| 512 | RNA1{[moe](A)[sp].[moe](A)[sp].[moe]([m5C])[sp].[moe]([m5C])[sp].[ |
| | moe](T)[sp].[moe](T)[sp].[moe](G)[sp].[moe](G)[sp].[moe](T)[sp].[moe]( |
| | T)[sp].[moe](T)[sp].[moe]([m5C])[sp].[moe](T)[sp].[moe](G)[sp].[moe](T |
| | )[sp].[moe](G)[sp].[moe](A)[sp].[moe](T)}$$$$V2.0 |
| 513 | RNA1{[moe](T)[sp].[moe](A)[sp].[moe](A)[sp].[moe]([m5C])[sp].[moe]( |
| | [m5C])[sp].[moe](T)[sp].[moe](T)[sp].[moe](G)[sp].[moe](G)[sp].[moe]( |
| | T)[sp].[moe](T)[sp].[moe](T)[sp].[moe]([m5C])[sp].[moe](T)[sp].[moe](G |
| | )[sp].[moe](T)[sp].[moe](G)[sp].[moe](A)}$$$$V2.0 |
| 514 | RNA1{[moe](T)[sp].[moe](T)[sp].[moe](G)[sp].[moe](A)[sp].[moe](T)[sp |
| | ].[moe](A)[sp].[moe]([m5C])[sp].[moe](T)[sp].[moe](A)[sp].[moe](A)[sp] |
| | .[moe]([m5C])[sp].[moe]([m5C])[sp].[moe](T)[sp].[moe](T)[sp].[moe](G) |
| | [sp].[moe](G)[sp].[moe](T)[sp].[moe](T)}$$$$V2.0 |
| 515 | RNA1{[moe](T)[sp].[moe](T)[sp].[moe](T)[sp].[moe](G)[sp].[moe](A)[sp |
| | ].[moe](T)[sp].[moe](A)[sp].[moe]([m5C])[sp].[moe](T)[sp].[moe](A)[sp] |
| | .[moe](A)[sp].[moe]([m5C])[sp].[moe]([m5C])[sp].[moe](T)[sp].[moe](T) |
| | [sp].[moe](G)[sp].[moe](G)[sp].[moe](T)}$$$$V2.0 |
| 516 | RNA1{[moe]([m5C])[sp].[moe](T)[sp].[moe](T)[sp].[moe](T)[sp].[moe]( |
| | G)[sp].[moe](A)[sp].[moe](T)[sp].[moe](A)[sp].[moe]([m5C])[sp].[moe]( |
| | T)[sp].[moe](A)[sp].[moe](A)[sp].[moe]([m5C])[sp].[moe]([m5C])[sp].[m |
| | oe](T)[sp].[moe](T)[sp].[moe](G)[sp].[moe](G)}$$$$V2.0 |
| 517 | RNA1{[moe](T)[sp].[moe]([m5C])[sp].[moe](T)[sp].[moe](T)[sp].[moe]( |
| | T)[sp].[moe](G)[sp].[moe](A)[sp].[moe](T)[sp].[moe](A)[sp].[moe]([m5C |
| | ])[sp].[moe](T)[sp].[moe](A)[sp].[moe](A)[sp].[moe]([m5C])[sp].[moe]([ |
| | m5C])[sp].[moe](T)[sp].[moe](T)[sp].[moe](G)}$$$$V2.0 |
| 518 | RNA1{[moe](T)[sp].[moe](A)[sp].[moe](T)[sp].[moe]([m5C])[sp].[moe]( |
| | T)[sp].[moe](T)[sp].[moe](T)[sp].[moe](G)[sp].[moe](A)[sp].[moe](T)[sp] |
| | .[moe](A)[sp].[moe]([m5C])[sp].[moe](T)[sp].[moe](A)[sp].[moe](A)[sp]. |
| | [moe]([m5C])[sp].[moe]([m5C])[sp].[moe](T)}$$$$V2.0 |
| 519 | RNA1{[moe](G)[sp].[moe](T)[sp].[moe](A)[sp].[moe](T)[sp].[moe]([m5 |
| | C])[sp].[moe](T)[sp].[moe](T)[sp].[moe](T)[sp].[moe](G)[sp].[moe](A)[s |
| | p].[moe](T)[sp].[moe](A)[sp].[moe]([m5C])[sp].[moe](T)[sp].[moe](A)[sp |
| | ].[moe](A)[sp].[moe]([m5C])[sp].[moe]([m5C])}$$$$V2.0 |
| 520 | RNA1{[moe](G)[sp].[moe](G)[sp].[moe](T)[sp].[moe](A)[sp].[moe](T)[s |
| | p].[moe]([m5C])[sp].[moe](T)[sp].[moe](T)[sp].[moe](T)[sp].[moe](G)[sp |
| | ].[moe](A)[sp].[moe](T)[sp].[moe](A)[sp].[moe]([m5C])[sp].[moe](T)[sp] |
| | .[moe](A)[sp].[moe](A)[sp].[moe]([m5C])}$$$$V2.0 |
| 521 | RNA1{[moe](A)[sp].[moe](G)[sp].[moe](G)[sp].[moe](T)[sp].[moe](A)[s |
| | p].[moe](T)[sp].[moe]([m5C])[sp].[moe](T)[sp].[moe](T)[sp].[moe](T)[sp |
| | ].[moe](G)[sp].[moe](A)[sp].[moe](T)[sp].[moe](A)[sp].[moe]([m5C])[sp] |
| | .[moe](T)[sp].[moe](A)[sp].[moe](A)}$$$$V2.0 |
| 522 | RNA1{[fl2r](T)[sp].[moe](G)[sp].[moe](T)[sp].[moe](T)[sp].[moe]([m5C |
| | ])[sp].[moe](T)[sp].[moe](T)[sp].[moe](G)[sp].[moe](T)[sp].[moe](A)[sp]. |
| | [moe]([m5C])[sp].[moe](T)[sp].[moe](T)[sp].[moe]([m5C])[sp].[moe](A)[ |
| | sp].[moe](T)[sp].[moe]([m5C])[sp].[fl2r]([m5C])}$$$$V2.0 |
| 523 | RNA1{[fl2r](T)[sp].[fl2r](G)[sp].[moe](T)[sp].[moe](T)[sp].[moe]([m5C] |
| | )[sp].[moe](T)[sp].[moe](T)[sp].[moe](G)[sp].[moe](T)[sp].[moe](A)[sp].[ |
| | moe]([m5C])[sp].[moe](T)[sp].[moe](T)[sp].[moe]([m5C])[sp].[moe](A)[s |
| | p].[moe](T)[sp].[fl2r]([m5C])[sp].[fl2r]([m5C])}$$$$V2.0 |
| 524 | RNA1{[fl2r](T)[sp].[fl2r](G)[sp].[fl2r](T)[sp].[moe](T)[sp].[moe]([m5C]) |
| | [sp].[moe](T)[sp].[moe](T)[sp].[moe](G)[sp].[moe](T)[sp].[moe](A)[sp].[ |
| | moe]([m5C])[sp].[moe](T)[sp].[moe](T)[sp].[moe]([m5C])[sp].[moe](A)[s |
| | p].[fl2r](T)[sp].[fl2r]([m5C])[sp].[fl2r]([m5C])}$$$$V2.0 |
| 525 | RNA1{[fl2r](T)[sp].[fl2r](G)[sp].[fl2r](T)[sp].[fl2r](T)[sp].[moe]([m5C])[ |
| | sp].[moe](T)[sp].[moe](T)[sp].[moe](G)[sp].[moe](T)[sp].[moe](A)[sp].[ |
| | moe]([m5C])[sp].[moe](T)[sp].[moe](T)[sp].[moe]([m5C])[sp].[fl2r](A)[s |
| | p].[fl2r](T)[sp].[fl2r]([m5C])[sp].[fl2r]([m5C])}$$$$V2.0 |
| 526 | RNA1{[fl2r](T)[sp].[fl2r](G)[sp].[fl2r](T)[sp].[fl2r](T)[sp].[fl2r]([m5C])[s |
| | p].[moe](T)[sp].[moe](T)[sp].[moe](G)[sp].[moe](T)[sp].[moe](A)[sp].[m |
| | oe]([m5C])[sp].[moe](T)[sp].[moe](T)[sp].[fl2r]([m5C])[sp].[fl2r](A)[sp]. |
| | [fl2r](T)[sp].[fl2r]([m5C])[sp].[fl2r]([m5C])}$$$$V2.0 |
| 527 | RNA1{[fl2r](T)[sp].[fl2r](G)[sp].[fl2r](T)[sp].[fl2r](T)[sp].[fl2r]([m5C])[s |
| | p].[fl2r](T)[sp].[moe](T)[sp].[moe](G)[sp].[moe](T)[sp].[moe](A)[sp].[mo |
| | e]([m5C])[sp].[moe](T)[sp].[fl2r](T)[sp].[fl2r]([m5C])[sp].[fl2r](A)[sp].[fl |
| | 2r](T)[sp].[fl2r]([m5C])[sp].[fl2r]([m5C])}$$$$V2.0 |
| 528 | RNA1{[fl2r](T)[sp].[fl2r](G)[sp].[fl2r](T)[sp].[fl2r](T)[sp].[fl2r]([m5C])[s |
| | p].[fl2r](T)[sp].[fl2r](T)[sp].[moe](G)[sp].[moe](T)[sp].[moe](A)[sp].[mo |
| | e]([m5C])[sp].[fl2r](T)[sp].[fl2r](T)[sp].[fl2r]([m5C])[sp].[fl2r](A)[sp].[fl |
| | 2r](T)[sp].[fl2r]([m5C])[sp].[fl2r]([m5C])}$$$$V2.0 |
| 529 | RNA1{[fl2r](T)[sp].[fl2r](G)[sp].[fl2r](T)[sp].[fl2r](T)[sp].[fl2r]([m5C])[s |
| | p].[fl2r](T)[sp].[fl2r](T)[sp].[fl2r](G)[sp].[moe](T)[sp].[moe](A)[sp].[fl2r] |
| | ([m5C])[sp].[fl2r](T)[sp].[fl2r](T)[sp].[fl2r]([m5C])[sp].[fl2r](A)[sp].[fl2r] |
| | (T)[sp].[fl2r]([m5C])[sp].[fl2r]([m5C])}$$$$V2.0 |
| 530 | RNA1{[fl2r](T)[sp].[fl2r](G)[sp].[fl2r](T)[sp].[fl2r](T)[sp].[fl2r]([m5C])[s |
| | p].[fl2r](T)[sp].[fl2r](T)[sp].[fl2r](G)[sp].[fl2r](T)[sp].[fl2r](A)[sp].[fl2r]([ |
| | m5C])[sp].[fl2r](T)[sp].[fl2r](T)[sp].[fl2r]([m5C])[sp].[fl2r](A)[sp].[fl2r]( |
| | T)[sp].[fl2r]([m5C])[sp].[fl2r]([m5C])}$$$$V2.0 |
| 531 | RNA1{[moe](T)[sp].[fl2r](G)[sp].[moe](T)[sp].[fl2r](T)[sp].[moe]([m5C] |
| | )[sp].[fl2r](T)[sp].[moe](T)[sp].[fl2r](G)[sp].[moe](T)[sp].[fl2r](A)[sp].[m |
| | oe]([m5C])[sp].[fl2r](T)[sp].[moe](T)[sp].[fl2r]([m5C])[sp].[moe](A)[sp]. |
| | [fl2r](T)[sp].[moe]([m5C])[sp].[fl2r]([m5C])}$$$$V2.0 |
| 532 | RNA1{[fl2r](T)[sp].[moe](G)[sp].[fl2r](T)[sp].[moe](T)[sp].[fl2r]([m5C]) |
| | [sp].[moe](T)[sp].[fl2r](T)[sp].[moe](G)[sp].[fl2r](T)[sp].[moe](A)[sp].[fl |
| | 2r]([m5C])[sp].[moe](T)[sp].[fl2r](T)[sp].[moe]([m5C])[sp].[fl2r](A)[sp].[ |
| | moe](T)[sp].[fl2r]([m5C])[sp].[moe]([m5C])}$$$$V2.0 |
| 533 | RNA1{[fl2r](T)[sp].[fl2r](G)[sp].[moe](T)[sp].[moe](T)[sp].[fl2r]([m5C]) |
| | [sp].[fl2r](T)[sp].[moe](T)[sp].[moe](G)[sp].[fl2r](T)[sp].[fl2r](A)[sp].[m |
| | oe]([m5C])[sp].[moe](T)[sp].[fl2r](T)[sp].[fl2r]([m5C])[sp].[moe](A)[sp]. |
| | [moe](T)[sp].[fl2r]([m5C])[sp].[fl2r]([m5C])}$$$$V2.0 |
| 534 | RNA1{[fl2r](T)[sp].[fl2r](G)[sp].[fl2r](T)[sp].[moe](T)[sp].[moe]([m5C]) |
| | [sp].[moe](T)[sp].[fl2r](T)[sp].[fl2r](G)[sp].[fl2r](T)[sp].[moe](A)[sp].[m |
| | oe]([m5C])[sp].[moe](T)[sp].[fl2r](T)[sp].[fl2r]([m5C])[sp].[fl2r](A)[sp].[ |
| | moe](T)[sp].[moe]([m5C])[sp].[moe]([m5C])}$$$$V2.0 |
| 535 | RNA1{[moe](T)[sp].[moe](G)[sp].[moe](T)[sp].[moe](T)[sp].[moe]([m5C |
| | ])[sp].[moe](T)[sp].[moe](T)[sp].[moe](G)[sp].[fl2r](T)[sp].[fl2r](A)[sp].[ |
| | moe]([m5C])[sp].[moe](T)[sp].[moe](T)[sp].[moe]([m5C])[sp].[moe](A)[s |
| | p].[moe](T)[sp].[moe]([m5C])[sp].[moe]([m5C])}$$$$V2.0 |
| 536 | RNA1{[moe](T)[sp].[moe](G)[sp].[moe](T)[sp].[moe](T)[sp].[moe]([m5C |
| | ])[sp].[moe](T)[sp].[moe](T)[sp].[fl2r](G)[sp].[fl2r](T)[sp].[fl2r](A)[sp].[f |
| | l2r]([m5C])[sp].[moe](T)[sp].[moe](T)[sp].[moe]([m5C])[sp].[moe](A)[sp |
| | ].[moe](T)[sp].[moe]([m5C])[sp].[moe]([m5C])}$$$$V2.0 |
| 537 | RNA1{[moe](T)[sp].[moe](G)[sp].[moe](T)[sp].[moe](T)[sp].[moe]([m5C |
| | ])[sp].[moe](T)[sp].[fl2r](T)[sp].[fl2r](G)[sp].[fl2r](T)[sp].[fl2r](A)[sp].[fl |
| | 2r]([m5C])[sp].[fl2r](T)[sp].[moe](T)[sp].[moe]([m5C])[sp].[moe](A)[sp]. |
| | [moe](T)[sp].[moe]([m5C])[sp].[moe]([m5C])}$$$$V2.0 |
| 538 | RNA1{[moe](T)[sp].[moe](G)[sp].[moe](T)[sp].[moe](T)[sp].[moe]([m5C |
| | ])[sp].[fl2r](T)[sp].[fl2r](T)[sp].[fl2r](G)[sp].[fl2r](T)[sp].[fl2r](A)[sp].[fl2 |
| | r]([m5C])[sp].[fl2r](T)[sp].[fl2r](T)[sp].[moe]([m5C])[sp].[moe](A)[sp].[ |
| | moe](T)[sp].[moe]([m5C])[sp].[moe]([m5C])}$$$$V2.0 |
| 539 | RNA1{[moe](T)[sp].[moe](G)[sp].[moe](T)[sp].[moe](T)[sp].[fl2r]([m5C |
| | ])[sp].[fl2r](T)[sp].[fl2r](T)[sp].[fl2r](G)[sp].[fl2r](T)[sp].[fl2r](A)[sp].[fl2 |
| | r]([m5C])[sp].[fl2r](T)[sp].[fl2r](T)[sp].[fl2r]([m5C])[sp].[moe](A)[sp].[m |
| | oe](T)[sp].[moe]([m5C])[sp].[moe]([m5C])}$$$$V2.0 |
| 540 | RNA1{[moe](T)[sp].[moe](G)[sp].[moe](T)[sp].[fl2r](T)[sp].[fl2r]([m5C] |
| | )[sp].[fl2r](T)[sp].[fl2r](T)[sp].[fl2r](G)[sp].[fl2r](T)[sp].[fl2r](A)[sp].[fl2r |
| | ]([m5C])[sp].[fl2r](T)[sp].[fl2r](T)[sp].[fl2r]([m5C])[sp].[fl2r](A)[sp].[mo |
| | e](T)[sp].[moe]([m5C])[sp].[moe]([m5C])}$$$$V2.0 |
| 541 | RNA1{[moe]([m5C])[sp].[moe]([m5C])[sp].[moe](A)[sp].[moe](T)[sp].[ |
| | moe](G)[sp].[moe](A)[sp].[moe]([m5C])[sp].[moe](T)[sp].[moe]([m5C])[ |
| | sp].[moe](A)[sp].[moe](A)[sp].[moe](G)[sp].[moe]([m5C])[sp].[moe](T)[s |
| | p].[moe](T)[sp].[moe](G)[sp].[moe](G)[sp].[moe]([m5C])}$$$$V2.0 |
| 542 | RNA1{[moe](T)[sp].[moe]([m5C])[sp].[moe]([m5C])[sp].[moe](A)[sp].[ |
| | moe](T)[sp].[moe](G)[sp].[moe](A)[sp].[moe]([m5C])[sp].[moe](T)[sp].[ |
| | moe]([m5C])[sp].[moe](A)[sp].[moe](A)[sp].[moe](G)[sp].[moe]([m5C])[ |
| | sp].[moe](T)[sp].[moe](T)[sp].[moe](G)[sp].[moe](G)}$$$$V2.0 |
| 543 | RNA1{[moe](T)[sp].[moe](T)[sp].[moe]([m5C])[sp].[moe]([m5C])[sp].[m |
| | oe](A)[sp].[moe](T)[sp].[moe](G)[sp].[moe](A)[sp].[moe]([m5C])[sp].[m |
| | oe](T)[sp].[moe]([m5C])[sp].[moe](A)[sp].[moe](A)[sp].[moe](G)[sp].[m |
| | oe]([m5C])[sp].[moe](T)[sp].[moe](T)[sp].[moe](G)}$$$$V2.0 |
| 544 | RNA1{[moe]([m5C])[sp].[moe](T)[sp].[moe](T)[sp].[moe]([m5C])[sp].[m |
| | oe]([m5C])[sp].[moe](A)[sp].[moe](T)[sp].[moe](G)[sp].[moe](A)[sp].[m |
| | oe]([m5C])[sp].[moe](T)[sp].[moe]([m5C])[sp].[moe](A)[sp].[moe](A)[sp |
| | ].[moe](G)[sp].[moe]([m5C])[sp].[moe](T)[sp].[moe](T)}$$$$V2.0 |
| 545 | RNA1{[moe](T)[sp].[moe]([m5C])[sp].[moe]([m5C])[sp].[moe](T)[sp].[m |
| | oe](T)[sp].[moe]([m5C])[sp].[moe]([m5C])[sp].[moe](A)[sp].[moe](T)[sp] |
| | .[moe](G)[sp].[moe](A)[sp].[moe]([m5C])[sp].[moe](T)[sp].[moe]([m5C]) |
| | [sp].[moe](A)[sp].[moe](A)[sp].[moe](G)[sp].[moe]([m5C])}$$$$V2.0 |
| 546 | RNA1{[moe]([m5C])[sp].[moe](T)[sp].[moe]([m5C])[sp].[moe]([m5C])[s |
| | p].[moe](T)[sp].[moe](T)[sp].[moe]([m5C])[sp].[moe]([m5C])[sp].[moe]( |
| | A)[sp].[moe](T)[sp].[moe](G)[sp].[moe](A)[sp].[moe]([m5C])[sp].[moe]( |
| | T)[sp].[moe]([m5C])[sp].[moe](A)[sp].[moe](A)[sp].[moe](G)}$$$$V2.0 |
| 547 | RNA1{[moe]([m5C])[sp].[moe]([m5C])[sp].[moe](T)[sp].[moe]([m5C])[s |
| | p].[moe]([m5C])[sp].[moe](T)[sp].[moe](T)[sp].[moe]([m5C])[sp].[moe]([ |
| | m5C])[sp].[moe](A)[sp].[moe](T)[sp].[moe](G)[sp].[moe](A)[sp].[moe]([ |
| | m5C])[sp].[moe](T)[sp].[moe]([m5C])[sp].[moe](A)[sp].[moe](A)}$$$$V |
| | 2.0 |
| 548 | RNA1{[moe]([m5C])[sp].[moe]([m5C])[sp].[moe]([m5C])[sp].[moe](T)[s |
| | p].[moe]([m5C])[sp].[moe]([m5C])[sp].[moe](T)[sp].[moe](T)[sp].[moe]([ |
| | m5C])[sp].[moe]([m5C])[sp].[moe](A)[sp].[moe](T)[sp].[moe](G)[sp].[m |
| | oe](A)[sp].[moe]([m5C])[sp].[moe](T)[sp].[moe]([m5C])[sp].[moe](A)}$ |
| | $$$V2.0 |
| 549 | RNA1{[moe](G)[sp].[moe](A)[sp].[moe]([m5C])[sp].[moe]([m5C])[sp].[ |
| | moe]([m5C])[sp].[moe](T)[sp].[moe]([m5C])[sp].[moe]([m5C])[sp].[moe] |
| | (T)[sp].[moe](T)[sp].[moe]([m5C])[sp].[moe]([m5C])[sp].[moe](A)[sp].[ |
| | moe](T)[sp].[moe](G)[sp].[moe](A)[sp].[moe]([m5C])[sp].[moe](T)}$$$$ |
| | V2.0 |
| 550 | RNA1{[moe](G)[sp].[moe](G)[sp].[moe](A)[sp].[moe]([m5C])[sp].[moe]( |
| | [m5C])[sp].[moe]([m5C])[sp].[moe](T)[sp].[moe]([m5C])[sp].[moe]([m5 |
| | C])[sp].[moe](T)[sp].[moe](T)[sp].[moe]([m5C])[sp].[moe]([m5C])[sp].[ |
| | moe](A)[sp].[moe](T)[sp].[moe](G)[sp].[moe](A)[sp].[moe]([m5C])}$$$$ |
| | V2.0 |
| 551 | RNA1{[moe](G)[sp].[moe](G)[sp].[moe](G)[sp].[moe](A)[sp].[moe]([m5 |
| | C])[sp].[moe]([m5C])[sp].[moe]([m5C])[sp].[moe](T)[sp].[moe]([m5C])[s |
| | p].[moe]([m5C])[sp].[moe](T)[sp].[moe](T)[sp].[moe]([m5C])[sp].[moe]([ |
| | m5C])[sp].[moe](A)[sp].[moe](T)[sp].[moe](G)[sp].[moe](A)}$$$$V2.0 |
| 552 | RNA1{[moe](A)[sp].[moe](G)[sp].[moe](G)[sp].[moe](G)[sp].[moe](A)[s |
| | p].[moe]([m5C])[sp].[moe]([m5C])[sp].[moe]([m5C])[sp].[moe](T)[sp].[m |
| | oe]([m5C])[sp].[moe]([m5C])[sp].[moe](T)[sp].[moe](T)[sp].[moe]([m5C] |
| | )[sp].[moe]([m5C])[sp].[moe](A)[sp].[moe](T)[sp].[moe](G)}$$$$V2.0 |
| 553 | RNA1{[lna](T)[sp].[moe](G)[sp].[moe](T)[sp].[moe](T)[sp].[moe]([m5C] |
| | )[sp].[moe](T)[sp].[moe](T)[sp].[moe](G)[sp].[moe](T)[sp].[moe](A)[sp].[ |
| | moe]([m5C])[sp].[moe](T)[sp].[moe](T)[sp].[moe]([m5C])[sp].[moe](A)[s |
| | p].[moe](T)[sp].[moe]([m5C])[sp].[moe]([m5C])}$$$$V2.0 |
| 554 | RNA1{[moe](T)[sp].[lna](G)[sp].[moe](T)[sp].[moe](T)[sp].[moe]([m5C] |
| | )[sp].[moe](T)[sp].[moe](T)[sp].[moe](G)[sp].[moe](T)[sp].[moe](A)[sp].[ |
| | moe]([m5C])[sp].[moe](T)[sp].[moe](T)[sp].[moe]([m5C])[sp].[moe](A)[s |
| | p].[moe](T)[sp].[moe]([m5C])[sp].[moe]([m5C])}$$$$V2.0 |
| 555 | RNA1{[moe](T)[sp].[moe](G)[sp].[lna](T)[sp].[moe](T)[sp].[moe]([m5C] |
| | )[sp].[moe](T)[sp].[moe](T)[sp].[moe](G)[sp].[moe](T)[sp].[moe](A)[sp].[ |
| | moe]([m5C])[sp].[moe](T)[sp].[moe](T)[sp].[moe]([m5C])[sp].[moe](A)[s |
| | p].[moe](T)[sp].[moe]([m5C])[sp].[moe]([m5C])}$$$$V2.0 |
| 556 | RNA1{[moe](T)[sp].[moe](G)[sp].[moe](T)[sp].[lna](T)[sp].[moe]([m5C] |
| | )[sp].[moe](T)[sp].[moe](T)[sp].[moe](G)[sp].[moe](T)[sp].[moe](A)[sp].[ |
| | moe]([m5C])[sp].[moe](T)[sp].[moe](T)[sp].[moe]([m5C])[sp].[moe](A)[s |
| | p].[moe](T)[sp].[moe]([m5C])[sp].[moe]([m5C])}$$$$V2.0 |
| 557 | RNA1{[moe](T)[sp].[moe](G)[sp].[moe](T)[sp].[moe](T)[sp].[lna]([m5C] |
| | )[sp].[moe](T)[sp].[moe](T)[sp].[moe](G)[sp].[moe](T)[sp].[moe](A)[sp].[ |
| | moe]([m5C])[sp].[moe](T)[sp].[moe](T)[sp].[moe]([m5C])[sp].[moe](A)[s |
| | p].[moe](T)[sp].[moe]([m5C])[sp].[moe]([m5C])}$$$$V2.0 |
| 558 | RNA1{[moe](T)[sp].[moe](G)[sp].[moe](T)[sp].[moe](T)[sp].[moe]([m5C |
| | ])[sp].[lna](T)[sp].[moe](T)[sp].[moe](G)[sp].[moe](T)[sp].[moe](A)[sp].[ |
| | moe]([m5C])[sp].[moe](T)[sp].[moe](T)[sp].[moe]([m5C])[sp].[moe](A)[s |
| | p].[moe](T)[sp].[moe]([m5C])[sp].[moe]([m5C])}$$$$V2.0 |
| 559 | RNA1{[moe](T)[sp].[moe](G)[sp].[moe](T)[sp].[moe](T)[sp].[moe]([m5C |
| | ])[sp].[moe](T)[sp].[lna](T)[sp].[moe](G)[sp].[moe](T)[sp].[moe](A)[sp].[ |
| | moe]([m5C])[sp].[moe](T)[sp].[moe](T)[sp].[moe]([m5C])[sp].[moe](A)[s |
| | p].[moe](T)[sp].[moe]([m5C])[sp].[moe]([m5C])}$$$$V2.0 |
| 560 | RNA1{[moe](T)[sp].[moe](G)[sp].[moe](T)[sp].[moe](T)[sp].[moe]([m5C |
| | ])[sp].[moe](T)[sp].[moe](T)[sp].[lna](G)[sp].[moe](T)[sp].[moe](A)[sp].[ |
| | moe]([m5C])[sp].[moe](T)[sp].[moe](T)[sp].[moe]([m5C])[sp].[moe](A)[s |
| | p].[moe](T)[sp].[moe]([m5C])[sp].[moe]([m5C])}$$$$V2.0 |
| 561 | RNA1{[moe](T)[sp].[moe](G)[sp].[moe](T)[sp].[moe](T)[sp].[moe]([m5C |
| | ])[sp].[moe](T)[sp].[moe](T)[sp].[moe](G)[sp].[lna](T)[sp].[moe](A)[sp].[ |
| | moe]([m5C])[sp].[moe](T)[sp].[moe](T)[sp].[moe]([m5C])[sp].[moe](A)[s |
| | p].[moe](T)[sp].[moe]([m5C])[sp].[moe]([m5C])}$$$$V2.0 |
| 562 | RNA1{[moe](T)[sp].[moe](G)[sp].[moe](T)[sp].[moe](T)[sp].[moe]([m5C |
| | ])[sp].[moe](T)[sp].[moe](T)[sp].[moe](G)[sp].[moe](T)[sp].[lna](A)[sp].[ |
| | moe]([m5C])[sp].[moe](T)[sp].[moe](T)[sp].[moe]([m5C])[sp].[moe](A)[s |
| | p].[moe](T)[sp].[moe]([m5C])[sp].[moe]([m5C])}$$$$V2.0 |
| 563 | RNA1{[moe](T)[sp].[moe](G)[sp].[moe](T)[sp].[moe](T)[sp].[moe]([m5C |
| | ])[sp].[moe](T)[sp].[moe](T)[sp].[moe](G)[sp].[moe](T)[sp].[moe](A)[sp]. |
| | [lna]([m5C])[sp].[moe](T)[sp].[moe](T)[sp].[moe]([m5C])[sp].[moe](A)[s |
| | p].[moe](T)[sp].[moe]([m5C])[sp].[moe]([m5C])}$$$$V2.0 |
| 564 | RNA1{[moe](T)[sp].[moe](G)[sp].[moe](T)[sp].[moe](T)[sp].[moe]([m5C |
| | ])[sp].[moe](T)[sp].[moe](T)[sp].[moe](G)[sp].[moe](T)[sp].[moe](A)[sp]. |
| | [moe]([m5C])[sp].[lna](T)[sp].[moe](T)[sp].[moe]([m5C])[sp].[moe](A)[s |
| | p].[moe](T)[sp].[moe]([m5C])[sp].[moe]([m5C])}$$$$V2.0 |
| 565 | RNA1{[moe](T)[sp].[moe](G)[sp].[moe](T)[sp].[moe](T)[sp].[moe]([m5C |
| | ])[sp].[moe](T)[sp].[moe](T)[sp].[moe](G)[sp].[moe](T)[sp].[moe](A)[sp]. |
| | [moe]([m5C])[sp].[moe](T)[sp].[lna](T)[sp].[moe]([m5C])[sp].[moe](A)[s |
| | p].[moe](T)[sp].[moe]([m5C])[sp].[moe]([m5C])}$$$$V2.0 |
| 566 | RNA1{[moe](T)[sp].[moe](G)[sp].[moe](T)[sp].[moe](T)[sp].[moe]([m5C |
| | ])[sp].[moe](T)[sp].[moe](T)[sp].[moe](G)[sp].[moe](T)[sp].[moe](A)[sp]. |
| | [moe]([m5C])[sp].[moe](T)[sp].[moe](T)[sp].[lna]([m5C])[sp].[moe](A)[s |
| | p].[moe](T)[sp].[moe]([m5C])[sp].[moe]([m5C])}$$$$V2.0 |
| 567 | RNA1{[moe](T)[sp].[moe](G)[sp].[moe](T)[sp].[moe](T)[sp].[moe]([m5C |
| | ])[sp].[moe](T)[sp].[moe](T)[sp].[moe](G)[sp].[moe](T)[sp].[moe](A)[sp]. |
| | [moe]([m5C])[sp].[moe](T)[sp].[moe](T)[sp].[moe]([m5C])[sp].[lna](A)[s |
| | p].[moe](T)[sp].[moe]([m5C])[sp].[moe]([m5C])}$$$$V2.0 |
| 568 | RNA1{[moe](T)[sp].[moe](G)[sp].[moe](T)[sp].[moe](T)[sp].[moe]([m5C |
| | ])[sp].[moe](T)[sp].[moe](T)[sp].[moe](G)[sp].[moe](T)[sp].[moe](A)[sp]. |
| | [moe]([m5C])[sp].[moe](T)[sp].[moe](T)[sp].[moe]([m5C])[sp].[moe](A)[ |
| | sp].[lna](T)[sp].[moe]([m5C])[sp].[moe]([m5C])}$$$$V2.0 |
| 569 | RNA1{[moe](T)[sp].[moe](G)[sp].[moe](T)[sp].[moe](T)[sp].[moe]([m5C |
| | ])[sp].[moe](T)[sp].[moe](T)[sp].[moe](G)[sp].[moe](T)[sp].[moe](A)[sp]. |
| | [moe]([m5C])[sp].[moe](T)[sp].[moe](T)[sp].[moe]([m5C])[sp].[moe](A)[ |
| | sp].[moe](T)[sp].[lna]([m5C])[sp].[moe]([m5C])}$$$$V2.0 |
| 570 | RNA1{[moe](T)[sp].[moe](G)[sp].[moe](T)[sp].[moe](T)[sp].[moe]([m5C |
| | ])[sp].[moe](T)[sp].[moe](T)[sp].[moe](G)[sp].[moe](T)[sp].[moe](A)[sp]. |
| | [moe]([m5C])[sp].[moe](T)[sp].[moe](T)[sp].[moe]([m5C])[sp].[moe](A)[ |
| | sp].[moe](T)[sp].[moe]([m5C])[sp].[lna]([m5C])}$$$$V2.0 |
| 571 | RNA1{[lna](A)[sp].[moe](G)[sp].[moe](G)[sp].[moe](T)[sp].[moe](G)[sp |
| | ].[moe](T)[sp].[moe](T)[sp].[moe]([m5C])[sp].[moe](T)[sp].[moe](T)[sp]. |
| | [moe](G)[sp].[moe](T)[sp].[moe](A)[sp].[moe]([m5C])[sp].[moe](T)[sp].[ |
| | moe](T)[sp].[moe]([m5C])[sp].[moe](A)}$$$$V2.0 |
| 572 | RNA1{[moe](A)[sp].[lna](G)[sp].[moe](G)[sp].[moe](T)[sp].[moe](G)[sp |
| | ].[moe](T)[sp].[moe](T)[sp].[moe]([m5C])[sp].[moe](T)[sp].[moe](T)[sp]. |
| | [moe](G)[sp].[moe](T)[sp].[moe](A)[sp].[moe]([m5C])[sp].[moe](T)[sp].[ |
| | moe](T)[sp].[moe]([m5C])[sp].[moe](A)}$$$$V2.0 |
| 573 | RNA1{[lna](T)[sp].[moe](G)[sp].[moe](T)[sp].[moe](T)[sp].[moe]([m5C] |
| | )[sp].[moe](T)[sp].[moe](T)[sp].[moe](G)[sp].[moe](T)[sp].[moe](A)[sp].[ |
| | moe]([m5C])[sp].[moe](T)[sp].[moe](T)[sp].[moe]([m5C])[sp].[moe](A)[s |
| | p].[moe](T)[sp].[lna]([m5C])[sp].[lna]([m5C])}$$$$V2.0 |
| 574 | RNA1{[lna](T)[sp].[lna](G)[sp].[moe](T)[sp].[moe](T)[sp].[moe]([m5C])[ |
| | sp].[moe](T)[sp].[moe](T)[sp].[moe](G)[sp].[moe](T)[sp].[moe](A)[sp].[ |
| | moe]([m5C])[sp].[moe](T)[sp].[moe](T)[sp].[moe]([m5C])[sp].[moe](A)[s |
| | p].[moe](T)[sp].[moe]([m5C])[sp].[lna]([m5C])}$$$$V2.0 |
| 575 | RNA1{[moe](T)[sp].[moe](G)[sp].[moe](T)[sp].[moe](A)[sp].[moe]([m5 |
| | C])[sp].[moe](T)[sp].[moe](T)[sp].[moe]([m5C])[sp].[moe](A)[sp].[moe]( |
| | T)[sp].[moe]([m5C])[sp].[moe]([m5C])[sp].[moe]([m5C])[sp].[moe](A)}$ |
| | $$$V2.0 |
| 576 | RNA1{[moe](T)[sp].[moe](T)[sp].[moe](G)[sp].[moe](T)[sp].[moe](A)[sp |
| | ].[moe]([m5C])[sp].[moe](T)[sp].[moe](T)[sp].[moe]([m5C])[sp].[moe](A |
| | )[sp].[moe](T)[sp].[moe]([m5C])[sp].[moe]([m5C])[sp].[moe]([m5C])}$$ |
| | $$V2.0 |
| 577 | RNA1{[moe]([m5C])[sp].[moe](T)[sp].[moe](T)[sp].[moe](G)[sp].[moe]( |
| | T)[sp].[moe](A)[sp].[moe]([m5C])[sp].[moe](T)[sp].[moe](T)[sp].[moe]([ |
| | m5C])[sp].[moe](A)[sp].[moe](T)[sp].[moe]([m5C])[sp].[moe]([m5C])}$$ |
| | $$V2.0 |
| 578 | RNA1{[moe](T)[sp].[moe]([m5C])[sp].[moe](T)[sp].[moe](T)[sp].[moe]( |
| | G)[sp].[moe](T)[sp].[moe](A)[sp].[moe]([m5C])[sp].[moe](T)[sp].[moe]( |
| | T)[sp].[moe]([m5C])[sp].[moe](A)[sp].[moe](T)[sp].[moe]([m5C])}$$$$ |
| | V2.0 |
| 579 | RNA1{[moe](G)[sp].[moe](T)[sp].[moe](T)[sp].[moe]([m5C])[sp].[moe]( |
| | T)[sp].[moe](T)[sp].[moe](G)[sp].[moe](T)[sp].[moe](A)[sp].[moe]([m5C |
| | ])[sp].[moe](T)[sp].[moe](T)[sp].[moe]([m5C])[sp].[moe](A)}$$$$V2.0 |
| 580 | RNA1{[moe](G)[sp].[moe](T)[sp].[moe](G)[sp].[moe](T)[sp].[moe](T)[sp |
| | ].[moe]([m5C])[sp].[moe](T)[sp].[moe](T)[sp].[moe](G)[sp].[moe](T)[sp]. |
| | [moe](A)[sp].[moe]([m5C])[sp].[moe](T)[sp].[moe](T)}$$$$V2.0 |
| 581 | RNA1{[moe](A)[sp].[moe](G)[sp].[moe](G)[sp].[moe](T)[sp].[moe](G)[s |
| | p].[moe](T)[sp].[moe](T)[sp].[moe]([m5C])[sp].[moe](T)[sp].[moe](T)[sp |
| | ].[moe](G)[sp].[moe](T)[sp].[moe](A)[sp].[moe]([m5C])}$$$$V2.0 |
| 582 | RNA1{[moe](A)[sp].[moe](A)[sp].[moe](G)[sp].[moe](G)[sp].[moe](T)[s |
| | p].[moe](G)[sp].[moe](T)[sp].[moe](T)[sp].[moe]([m5C])[sp].[moe](T)[sp |
| | ].[moe](T)[sp].[moe](G)[sp].[moe](T)[sp].[moe](A)}$$$$V2.0 |
| 583 | RNA1{[lna](T)[sp].[lna](G)[sp].[lna](T)[sp].[moe](A)[sp].[moe]([m5C])[s |
| | p].[moe](T)[sp].[moe](T)[sp].[moe]([m5C])[sp].[moe](A)[sp].[moe](T)[sp |
| | ].[moe]([m5C])[sp].[lna]([m5C])[sp].[lna]([m5C])[sp].[lna](A)}$$$$V2.0 |
| 584 | RNA1{[lna](T)[sp].[lna](T)[sp].[lna](G)[sp].[moe](T)[sp].[moe](A)[sp].[ |
| | moe]([m5C])[sp].[moe](T)[sp].[moe](T)[sp].[moe]([m5C])[sp].[moe](A)[s |
| | p].[moe](T)[sp].[lna]([m5C])[sp].[lna]([m5C])[sp].[lna]([m5C])}$$$$V2.0 |
| 585 | RNA1{[lna]([m5C])[sp].[lna](T)[sp].[lna](T)[sp].[moe](G)[sp].[moe](T)[s |
| | p].[moe](A)[sp].[moe]([m5C])[sp].[moe](T)[sp].[moe](T)[sp].[moe]([m5C |
| | ])[sp].[moe](A)[sp].[lna](T)[sp].[lna]([m5C])[sp].[lna]([m5C])}$$$$V2.0 |
| 586 | RNA1{[lna](T)[sp].[lna]([m5C])[sp].[lna](T)[sp].[moe](T)[sp].[moe](G)[s |
| | p].[moe](T)[sp].[moe](A)[sp].[moe]([m5C])[sp].[moe](T)[sp].[moe](T)[sp |
| | ].[moe]([m5C])[sp].[lna](A)[sp].[lna](T)[sp].[lna]([m5C])}$$$$V2.0 |
| 587 | RNA1{[lna](G)[sp].[lna](T)[sp].[lna](T)[sp].[moe]([m5C])[sp].[moe](T)[s |
| | p].[moe](T)[sp].[moe](G)[sp].[moe](T)[sp].[moe](A)[sp].[moe]([m5C])[sp |
| | ].[moe](T)[sp].[lna](T)[sp].[lna]([m5C])[sp].[lna](A)}$$$$V2.0 |
| 588 | RNA1{[lna](G)[sp].[lna](T)[sp].[lna](G)[sp].[moe](T)[sp].[moe](T)[sp].[ |
| | moe]([m5C])[sp].[moe](T)[sp].[moe](T)[sp].[moe](G)[sp].[moe](T)[sp].[ |
| | moe](A)[sp].[lna]([m5C])[sp].[lna](T)[sp].[lna](T)}$$$$V2.0 |
| 589 | RNA1{[lna](A)[sp].[lna](G)[sp].[lna](G)[sp].[moe](T)[sp].[moe](G)[sp].[ |
| | moe](T)[sp].[moe](T)[sp].[moe]([m5C])[sp].[moe](T)[sp].[moe](T)[sp].[ |
| | moe](G)[sp].[lna](T)[sp].[lna](A)[sp].[lna]([m5C])}$$$$V2.0 |
| 590 | RNA1{[lna](A)[sp].[lna](A)[sp].[lna](G)[sp].[moe](G)[sp].[moe](T)[sp].[ |
| | moe](G)[sp].[moe](T)[sp].[moe](T)[sp].[moe]([m5C])[sp].[moe](T)[sp].[ |
| | moe](T)[sp].[lna](G)[sp].[lna](T)[sp].[lna](A)}$$$$V2.0 |
| 591 | RNA1{[moe](T)[sp].[moe](T)[sp].[moe](G)[sp].[moe](T)[sp].[moe](A)[sp |
| | ].[moe]([m5C])[sp].[moe](T)[sp].[moe](T)[sp].[moe]([m5C])[sp].[moe](A |
| | )[sp].[moe](T)[sp].[moe]([m5C])[sp].[moe]([m5C])[sp].[moe]([m5C])[sp]. |
| | [moe](A)}$$$$V2.0 |
| 592 | RNA1{[moe]([m5C])[sp].[moe](T)[sp].[moe](T)[sp].[moe](G)[sp].[moe]( |
| | T)[sp].[moe](A)[sp].[moe]([m5C])[sp].[moe](T)[sp].[moe](T)[sp].[moe]([ |
| | m5C])[sp].[moe](A)[sp].[moe](T)[sp].[moe]([m5C])[sp].[moe]([m5C])[sp |
| | ].[moe]([m5C])}$$$$V2.0 |
| 593 | RNA1{[moe](T)[sp].[moe]([m5C])[sp].[moe](T)[sp].[moe](T)[sp].[moe]( |
| | G)[sp].[moe](T)[sp].[moe](A)[sp].[moe]([m5C])[sp].[moe](T)[sp].[moe]( |
| | T)[sp].[moe]([m5C])[sp].[moe](A)[sp].[moe](T)[sp].[moe]([m5C])[sp].[m |
| | oe]([m5C])}$$$$V2.0 |
| 594 | RNA1{[moe](T)[sp].[moe](T)[sp].[moe]([m5C])[sp].[moe](T)[sp].[moe]( |
| | T)[sp].[moe](G)[sp].[moe](T)[sp].[moe](A)[sp].[moe]([m5C])[sp].[moe]( |
| | T)[sp].[moe](T)[sp].[moe]([m5C])[sp].[moe](A)[sp].[moe](T)[sp].[moe]([ |
| | m5C])}$$$$V2.0 |
| 595 | RNA1{[moe](G)[sp].[moe](T)[sp].[moe](T)[sp].[moe]([m5C])[sp].[moe]( |
| | T)[sp].[moe](T)[sp].[moe](G)[sp].[moe](T)[sp].[moe](A)[sp].[moe]([m5C |
| | ])[sp].[moe](T)[sp].[moe](T)[sp].[moe]([m5C])[sp].[moe](A)[sp].[moe](T |
| | )}$$$$V2.0 |
| 596 | RNA1{[moe](T)[sp].[moe](G)[sp].[moe](T)[sp].[moe](T)[sp].[moe]([m5C |
| | ])[sp].[moe](T)[sp].[moe](T)[sp].[moe](G)[sp].[moe](T)[sp].[moe](A)[sp]. |
| | [moe]([m5C])[sp].[moe](T)[sp].[moe](T)[sp].[moe]([m5C])[sp].[moe](A) |
| | }$$$$V2.0 |
| 597 | RNA1{[moe](G)[sp].[moe](T)[sp].[moe](G)[sp].[moe](T)[sp].[moe](T)[sp |
| | ].[moe]([m5C])[sp].[moe](T)[sp].[moe](T)[sp].[moe](G)[sp].[moe](T)[sp]. |
| | [moe](A)[sp].[moe]([m5C])[sp].[moe](T)[sp].[moe](T)[sp].[moe]([m5C]) |
| | }$$$$V2.0 |
| 598 | RNA1{[moe](G)[sp].[moe](G)[sp].[moe](T)[sp].[moe](G)[sp].[moe](T)[s |
| | p].[moe](T)[sp].[moe]([m5C])[sp].[moe](T)[sp].[moe](T)[sp].[moe](G)[sp |
| | ].[moe](T)[sp].[moe](A)[sp].[moe]([m5C])[sp].[moe](T)[sp].[moe](T)}$$ |
| | $$V2.0 |
| 599 | RNA1{[moe](A)[sp].[moe](G)[sp].[moe](G)[sp].[moe](T)[sp].[moe](G)[s |
| | p].[moe](T)[sp].[moe](T)[sp].[moe]([m5C])[sp].[moe](T)[sp].[moe](T)[sp |
| | ].[moe](G)[sp].[moe](T)[sp].[moe](A)[sp].[moe]([m5C])[sp].[moe](T)}$$ |
| | $$V2.0 |
| 600 | RNA1{[moe](A)[sp].[moe](A)[sp].[moe](G)[sp].[moe](G)[sp].[moe](T)[s |
| | p].[moe](G)[sp].[moe](T)[sp].[moe](T)[sp].[moe]([m5C])[sp].[moe](T)[sp |
| | ].[moe](T)[sp].[moe](G)[sp].[moe](T)[sp].[moe](A)[sp].[moe]([m5C])}$$ |
| | $$V2.0 |
| 601 | RNA1{[lna](T)[sp].[lna](T)[sp].[lna](G)[sp].[moe](T)[sp].[moe](A)[sp].[ |
| | moe]([m5C])[sp].[moe](T)[sp].[moe](T)[sp].[moe]([m5C])[sp].[moe](A)[s |
| | p].[moe](T)[sp].[moe]([m5C])[sp].[lna]([m5C])[sp].[lna]([m5C])[sp].[lna] |
| | (A)}$$$$V2.0 |
| 602 | RNA1{[lna]([m5C])[sp].[lna](T)[sp].[lna](T)[sp].[moe](G)[sp].[moe](T)[s |
| | p].[moe](A)[sp].[moe]([m5C])[sp].[moe](T)[sp].[moe](T)[sp].[moe]([m5C |
| | ])[sp].[moe](A)[sp].[moe](T)[sp].[lna]([m5C])[sp].[lna]([m5C])[sp].[lna]([ |
| | m5C])}$$$$V2.0 |
| 603 | RNA1{[lna](T)[sp].[lna]([m5C])[sp].[lna](T)[sp].[moe](T)[sp].[moe](G)[s |
| | p].[moe](T)[sp].[moe](A)[sp].[moe]([m5C])[sp].[moe](T)[sp].[moe](T)[sp |
| | ].[moe]([m5C])[sp].[moe](A)[sp].[lna](T)[sp].[lna]([m5C])[sp].[lna]([m5C |
| | ])}$$$$V2.0 |
| 604 | RNA1{[lna](T)[sp].[lna](T)[sp].[lna]([m5C])[sp].[moe](T)[sp].[moe](T)[s |
| | p].[moe](G)[sp].[moe](T)[sp].[moe](A)[sp].[moe]([m5C])[sp].[moe](T)[sp |
| | ].[moe](T)[sp].[moe]([m5C])[sp].[lna](A)[sp].[lna](T)[sp].[lna]([m5C])}$ |
| | $$$V2.0 |
| 605 | RNA1{[lna](G)[sp].[lna](T)[sp].[lna](T)[sp].[moe]([m5C])[sp].[moe](T)[s |
| | p].[moe](T)[sp].[moe](G)[sp].[moe](T)[sp].[moe](A)[sp].[moe]([m5C])[sp |
| | ].[moe](T)[sp].[moe](T)[sp].[lna]([m5C])[sp].[lna](A)[sp].[lna](T)}$$$$V |
| | 2.0 |
| 606 | RNA1{[lna](T)[sp].[lna](G)[sp].[lna](T)[sp].[moe](T)[sp].[moe]([m5C])[s |
| | p].[moe](T)[sp].[moe](T)[sp].[moe](G)[sp].[moe](T)[sp].[moe](A)[sp].[m |
| | oe]([m5C])[sp].[moe](T)[sp].[lna](T)[sp].[lna]([m5C])[sp].[lna](A)}$$$$ |
| | V2.0 |
| 607 | RNA1{[lna](G)[sp].[lna](T)[sp].[lna](G)[sp].[moe](T)[sp].[moe](T)[sp].[ |
| | moe]([m5C])[sp].[moe](T)[sp].[moe](T)[sp].[moe](G)[sp].[moe](T)[sp].[ |
| | moe](A)[sp].[moe]([m5C])[sp].[lna](T)[sp].[lna](T)[sp].[lna]([m5C])}$$$ |
| | $V2.0 |
| 608 | RNA1{[lna](G)[sp].[lna](G)[sp].[lna](T)[sp].[moe](G)[sp].[moe](T)[sp].[ |
| | moe](T)[sp].[moe]([m5C])[sp].[moe](T)[sp].[moe](T)[sp].[moe](G)[sp].[ |
| | moe](T)[sp].[moe](A)[sp].[lna]([m5C])[sp].[lna](T)[sp].[lna](T)}$$$$V2. |
| | 0 |
| 609 | RNA1{[lna](A)[sp].[lna](G)[sp].[lna](G)[sp].[moe](T)[sp].[moe](G)[sp].[ |
| | moe](T)[sp].[moe](T)[sp].[moe]([m5C])[sp].[moe](T)[sp].[moe](T)[sp].[ |
| | moe](G)[sp].[moe](T)[sp].[lna](A)[sp].[lna]([m5C])[sp].[lna](T)}$$$$V2. |
| | 0 |
| 610 | RNA1{[lna](A)[sp].[lna](A)[sp].[lna](G)[sp].[moe](G)[sp].[moe](T)[sp].[ |
| | moe](G)[sp].[moe](T)[sp].[moe](T)[sp].[moe]([m5C])[sp].[moe](T)[sp].[ |
| | moe](T)[sp].[moe](G)[sp].[lna](T)[sp].[lna](A)[sp].[lna]([m5C])}$$$$V2. |
| | 0 |
| 611 | RNA1{[moe]([m5C])[sp].[moe](T)[sp].[moe](T)[sp].[moe](G)[sp].[moe]( |
| | T)[sp].[moe](A)[sp].[moe]([m5C])[sp].[moe](T)[sp].[moe](T)[sp].[moe]([ |
| | m5C])[sp].[moe](A)[sp].[moe](T)[sp].[moe]([m5C])[sp].[moe]([m5C])[sp |
| | ].[moe]([m5C])[sp].[moe](A)}$$$$V2.0 |
| 612 | RNA1{[moe](T)[sp].[moe]([m5C])[sp].[moe](T)[sp].[moe](T)[sp].[moe]( |
| | G)[sp].[moe](T)[sp].[moe](A)[sp].[moe]([m5C])[sp].[moe](T)[sp].[moe]( |
| | T)[sp].[moe]([m5C])[sp].[moe](A)[sp].[moe](T)[sp].[moe]([m5C])[sp].[m |
| | oe]([m5C])[sp].[moe]([m5C])}$$$$V2.0 |
| 613 | RNA1{[moe](T)[sp].[moe](T)[sp].[moe]([m5C])[sp].[moe](T)[sp].[moe]( |
| | T)[sp].[moe](G)[sp].[moe](T)[sp].[moe](A)[sp].[moe]([m5C])[sp].[moe]( |
| | T)[sp].[moe](T)[sp].[moe]([m5C])[sp].[moe](A)[sp].[moe](T)[sp].[moe]([ |
| | m5C])[sp].[moe]([m5C])}$$$$V2.0 |
| 614 | RNA1{[moe](G)[sp].[moe](T)[sp].[moe](T)[sp].[moe]([m5C])[sp].[moe]( |
| | T)[sp].[moe](T)[sp].[moe](G)[sp].[moe](T)[sp].[moe](A)[sp].[moe]([m5C |
| | ])[sp].[moe](T)[sp].[moe](T)[sp].[moe]([m5C])[sp].[moe](A)[sp].[moe](T |
| | )[sp].[moe]([m5C])}$$$$V2.0 |
| 615 | RNA1{[moe](A)[sp].[moe](G)[sp].[moe](G)[sp].[moe](T)[sp].[moe](G)[s |
| | p].[moe](T)[sp].[moe](T)[sp].[moe]([m5C])[sp].[moe](T)[sp].[moe](T)[sp |
| | ].[moe](G)[sp].[moe](T)[sp].[moe](A)[sp].[moe]([m5C])[sp].[moe](T)[sp] |
| | .[moe](T)}$$$$V2.0 |
| 616 | RNA1{[moe](A)[sp].[moe](A)[sp].[moe](G)[sp].[moe](G)[sp].[moe](T)[s |
| | p].[moe](G)[sp].[moe](T)[sp].[moe](T)[sp].[moe]([m5C])[sp].[moe](T)[sp |
| | ].[moe](T)[sp].[moe](G)[sp].[moe](T)[sp].[moe](A)[sp].[moe]([m5C])[sp] |
| | .[moe](T)}$$$$V2.0 |
| 617 | RNA1{[lna]([m5C])[sp].[lna](T)[sp].[lna](T)[sp].[moe](G)[sp].[moe](T)[s |
| | p].[moe](A)[sp].[moe]([m5C])[sp].[moe](T)[sp].[moe](T)[sp].[moe]([m5C |
| | ])[sp].[moe](A)[sp].[moe](T)[sp].[moe]([m5C])[sp].[lna]([m5C])[sp].[lna] |
| | ([m5C])[sp].[lna](A)}$$$$V2.0 |
| 618 | RNA1{[lna](T)[sp].[lna]([m5C])[sp].[lna](T)[sp].[moe](T)[sp].[moe](G)[s |
| | p].[moe](T)[sp].[moe](A)[sp].[moe]([m5C])[sp].[moe](T)[sp].[moe](T)[sp |
| | ].[moe]([m5C])[sp].[moe](A)[sp].[moe](T)[sp].[lna]([m5C])[sp].[lna]([m5 |
| | C])[sp].[lna]([m5C])}$$$$V2.0 |
| 619 | RNA1{[lna](T)[sp].[lna](T)[sp].[lna]([m5C])[sp].[moe](T)[sp].[moe](T)[s |
| | p].[moe](G)[sp].[moe](T)[sp].[moe](A)[sp].[moe]([m5C])[sp].[moe](T)[sp |
| | ].[moe](T)[sp].[moe]([m5C])[sp].[moe](A)[sp].[lna](T)[sp].[lna]([m5C])[s |
| | p].[lna]([m5C])}$$$$V2.0 |
| 620 | RNA1{[lna](G)[sp].[lna](T)[sp].[lna](T)[sp].[moe]([m5C])[sp].[moe](T)[s |
| | p].[moe](T)[sp].[moe](G)[sp].[moe](T)[sp].[moe](A)[sp].[moe]([m5C])[sp |
| | ].[moe](T)[sp].[moe](T)[sp].[moe]([m5C])[sp].[lna](A)[sp].[lna](T)[sp].[l |
| | na]([m5C])}$$$$V2.0 |
| 621 | RNA1{[lna](A)[sp].[lna](G)[sp].[lna](G)[sp].[moe](T)[sp].[moe](G)[sp].[ |
| | moe](T)[sp].[moe](T)[sp].[moe]([m5C])[sp].[moe](T)[sp].[moe](T)[sp].[ |
| | moe](G)[sp].[moe](T)[sp].[moe](A)[sp].[lna]([m5C])[sp].[lna](T)[sp].[lna |
| | ](T)}$$$$V2.0 |
| 622 | RNA1{[lna](A)[sp].[lna](A)[sp].[lna](G)[sp].[moe](G)[sp].[moe](T)[sp].[ |
| | moe](G)[sp].[moe](T)[sp].[moe](T)[sp].[moe]([m5C])[sp].[moe](T)[sp].[ |
| | moe](T)[sp].[moe](G)[sp].[moe](T)[sp].[lna](A)[sp].[lna]([m5C])[sp].[lna |
| | ](T)}$$$$V2.0 |
| 623 | RNA1{[moe](T)[sp].[moe]([m5C])[sp].[moe](T)[sp].[moe](T)[sp].[moe]( |
| | G)[sp].[moe](T)[sp].[moe](A)[sp].[moe]([m5C])[sp].[moe](T)[sp].[moe]( |
| | T)[sp].[moe]([m5C])[sp].[moe](A)[sp].[moe](T)[sp].[moe]([m5C])[sp].[m |
| | oe]([m5C])[sp].[moe]([m5C])[sp].[moe](A)}$$$$V2.0 |
| 624 | RNA1{[moe](T)[sp].[moe](T)[sp].[moe]([m5C])[sp].[moe](T)[sp].[moe]( |
| | T)[sp].[moe](G)[sp].[moe](T)[sp].[moe](A)[sp].[moe]([m5C])[sp].[moe]( |
| | T)[sp].[moe](T)[sp].[moe]([m5C])[sp].[moe](A)[sp].[moe](T)[sp].[moe]([ |
| | m5C])[sp].[moe]([m5C])[sp].[moe]([m5C])}$$$$V2.0 |
| 625 | RNA1{[moe](G)[sp].[moe](T)[sp].[moe](T)[sp].[moe]([m5C])[sp].[moe]( |
| | T)[sp].[moe](T)[sp].[moe](G)[sp].[moe](T)[sp].[moe](A)[sp].[moe]([m5C |
| | ])[sp].[moe](T)[sp].[moe](T)[sp].[moe]([m5C])[sp].[moe](A)[sp].[moe](T |
| | )[sp].[moe]([m5C])[sp].[moe]([m5C])}$$$$V2.0 |
| 626 | RNA1{[moe](T)[sp].[moe](G)[sp].[moe](T)[sp].[moe](T)[sp].[moe]([m5C |
| | ])[sp].[moe](T)[sp].[moe](T)[sp].[moe](G)[sp].[moe](T)[sp].[moe](A)[sp]. |
| | [moe]([m5C])[sp].[moe](T)[sp].[moe](T)[sp].[moe]([m5C])[sp].[moe](A)[ |
| | sp].[moe](T)[sp].[moe]([m5C])}$$$$V2.0 |
| 627 | RNA1{[moe](G)[sp].[moe](T)[sp].[moe](G)[sp].[moe](T)[sp].[moe](T)[sp |
| | ].[moe]([m5C])[sp].[moe](T)[sp].[moe](T)[sp].[moe](G)[sp].[moe](T)[sp]. |
| | [moe](A)[sp].[moe]([m5C])[sp].[moe](T)[sp].[moe](T)[sp].[moe]([m5C])[ |
| | sp].[moe](A)[sp].[moe](T)}$$$$V2.0 |
| 628 | RNA1{[moe](G)[sp].[moe](G)[sp].[moe](T)[sp].[moe](G)[sp].[moe](T)[s |
| | p].[moe](T)[sp].[moe]([m5C])[sp].[moe](T)[sp].[moe](T)[sp].[moe](G)[sp |
| | ].[moe](T)[sp].[moe](A)[sp].[moe]([m5C])[sp].[moe](T)[sp].[moe](T)[sp]. |
| | [moe]([m5C])[sp].[moe](A)}$$$$V2.0 |
| 629 | RNA1{[moe](A)[sp].[moe](G)[sp].[moe](G)[sp].[moe](T)[sp].[moe](G)[s |
| | p].[moe](T)[sp].[moe](T)[sp].[moe]([m5C])[sp].[moe](T)[sp].[moe](T)[sp |
| | ].[moe](G)[sp].[moe](T)[sp].[moe](A)[sp].[moe]([m5C])[sp].[moe](T)[sp] |
| | .[moe](T)[sp].[moe]([m5C])}$$$$V2.0 |
| 630 | RNA1{[moe](A)[sp].[moe](A)[sp].[moe](G)[sp].[moe](G)[sp].[moe](T)[s |
| | p].[moe](G)[sp].[moe](T)[sp].[moe](T)[sp].[moe]([m5C])[sp].[moe](T)[sp |
| | ].[moe](T)[sp].[moe](G)[sp].[moe](T)[sp].[moe](A)[sp].[moe]([m5C])[sp] |
| | .[moe](T)[sp].[moe](T)}$$$$V2.0 |
| 631 | RNA1{[lna](T)[sp].[lna]([m5C])[sp].[lna](T)[sp].[moe](T)[sp].[moe](G)[s |
| | p].[moe](T)[sp].[moe](A)[sp].[moe]([m5C])[sp].[moe](T)[sp].[moe](T)[sp |
| | ].[moe]([m5C])[sp].[moe](A)[sp].[moe](T)[sp].[moe]([m5C])[sp].[lna]([m |
| | 5C])[sp].[lna]([m5C])[sp].[lna](A)}$$$$V2.0 |
| 632 | RNA1{[lna](T)[sp].[lna](T)[sp].[lna]([m5C])[sp].[moe](T)[sp].[moe](T)[s |
| | p].[moe](G)[sp].[moe](T)[sp].[moe](A)[sp].[moe]([m5C])[sp].[moe](T)[sp |
| | ].[moe](T)[sp].[moe]([m5C])[sp].[moe](A)[sp].[moe](T)[sp].[lna]([m5C])[ |
| | sp].[lna]([m5C])[sp].[lna]([m5C])}$$$$V2.0 |
| 633 | RNA1{[lna](G)[sp].[lna](T)[sp].[lna](T)[sp].[moe]([m5C])[sp].[moe](T)[s |
| | p].[moe](T)[sp].[moe](G)[sp].[moe](T)[sp].[moe](A)[sp].[moe]([m5C])[sp |
| | ].[moe](T)[sp].[moe](T)[sp].[moe]([m5C])[sp].[moe](A)[sp].[lna](T)[sp].[ |
| | lna]([m5C])[sp].[lna]([m5C])}$$$$V2.0 |
| 634 | RNA1{[lna](T)[sp].[lna](G)[sp].[lna](T)[sp].[moe](T)[sp].[moe]([m5C])[s |
| | p].[moe](T)[sp].[moe](T)[sp].[moe](G)[sp].[moe](T)[sp].[moe](A)[sp].[m |
| | oe]([m5C])[sp].[moe](T)[sp].[moe](T)[sp].[moe]([m5C])[sp].[lna](A)[sp]. |
| | [lna](T)[sp].[lna]([m5C])}$$$$V2.0 |
| 635 | RNA1{[lna](G)[sp].[lna](T)[sp].[lna](G)[sp].[moe](T)[sp].[moe](T)[sp].[ |
| | moe]([m5C])[sp].[moe](T)[sp].[moe](T)[sp].[moe](G)[sp].[moe](T)[sp].[ |
| | moe](A)[sp].[moe]([m5C])[sp].[moe](T)[sp].[moe](T)[sp].[lna]([m5C])[sp |
| | ].[lna](A)[sp].[lna](T)}$$$$V2.0 |
| 636 | RNA1{[lna](G)[sp].[lna](G)[sp].[lna](T)[sp].[moe](G)[sp].[moe](T)[sp].[ |
| | moe](T)[sp].[moe]([m5C])[sp].[moe](T)[sp].[moe](T)[sp].[moe](G)[sp].[ |
| | moe](T)[sp].[moe](A)[sp].[moe]([m5C])[sp].[moe](T)[sp].[lna](T)[sp].[ln |
| | a]([m5C])[sp].[lna](A)}$$$$V2.0 |
| 637 | RNA1{[lna](A)[sp].[lna](G)[sp].[lna](G)[sp].[moe](T)[sp].[moe](G)[sp].[ |
| | moe](T)[sp].[moe](T)[sp].[moe]([m5C])[sp].[moe](T)[sp].[moe](T)[sp].[ |
| | moe](G)[sp].[moe](T)[sp].[moe](A)[sp].[moe]([m5C])[sp].[lna](T)[sp].[ln |
| | a](T)[sp].[lna](m5C)}$$$$V2.0 |
| 638 | RNA1{[lna](A)[sp].[lna](A)[sp].[lna](G)[sp].[moe](G)[sp].[moe](T)[sp].[ |
| | moe](G)[sp].[moe](T)[sp].[moe](T)[sp].[moe]([m5C])[sp].[moe](T)[sp].[ |
| | moe](T)[sp].[moe](G)[sp].[moe](T)[sp].[moe](A)[sp].[lna]([m5C])[sp].[ln |
| | a](T)[sp].[lna](T)}$$$$V2.0 |
| 639 | RNA1{[moe](G)[sp].[moe](T)[sp].[moe](T)[sp].[moe]([m5C])[sp].[moe]( |
| | T)[sp].[moe](T)[sp].[moe](G)[sp].[moe](T)[sp].[moe](A)[sp].[moe]([m5C |
| | ])[sp].[moe](T)[sp].[moe](T)[sp].[moe]([m5C])[sp].[moe](A)[sp].[moe](T |
| | )[sp].[moe]([m5C])[sp].[moe]([m5C])[sp].[moe]([m5C])[sp].[moe](A)}$$ |
| | $$V2.0 |
| 640 | RNA1{[moe](T)[sp].[moe](G)[sp].[moe](T)[sp].[moe](T)[sp].[moe]([m5C |
| | ])[sp].[moe](T)[sp].[moe](T)[sp].[moe](G)[sp].[moe](T)[sp].[moe](A)[sp]. |
| | [moe]([m5C])[sp].[moe](T)[sp].[moe](T)[sp].[moe]([m5C])[sp].[moe](A)[ |
| | sp].[moe](T)[sp].[moe]([m5C])[sp].[moe]([m5C])[sp].[moe]([m5C])}$$$$ |
| | V2.0 |
| 641 | RNA1{[moe](G)[sp].[moe](T)[sp].[moe](G)[sp].[moe](T)[sp].[moe](T)[sp |
| | ].[moe]([m5C])[sp].[moe](T)[sp].[moe](T)[sp].[moe](G)[sp].[moe](T)[sp]. |
| | [moe](A)[sp].[moe]([m5C])[sp].[moe](T)[sp].[moe](T)[sp].[moe]([m5C])[ |
| | sp].[moe](A)[sp].[moe](T)[sp].[moe]([m5C])[sp].[moe]([m5C])}$$$$V2.0 |
| 642 | RNA1{[moe](G)[sp].[moe](G)[sp].[moe](T)[sp].[moe](G)[sp].[moe](T)[s |
| | p].[moe](T)[sp].[moe]([m5C])[sp].[moe](T)[sp].[moe](T)[sp].[moe](G)[sp |
| | ].[moe](T)[sp].[moe](A)[sp].[moe]([m5C])[sp].[moe](T)[sp].[moe](T)[sp]. |
| | [moe]([m5C])[sp].[moe](A)[sp].[moe](T)[sp].[moe]([m5C])}$$$$V2.0 |
| 643 | RNA1{[moe](A)[sp].[moe](G)[sp].[moe](G)[sp].[moe](T)[sp].[moe](G)[s |
| | p].[moe](T)[sp].[moe](T)[sp].[moe]([m5C])[sp].[moe](T)[sp].[moe](T)[sp |
| | ].[moe](G)[sp].[moe](T)[sp].[moe](A)[sp].[moe]([m5C])[sp].[moe](T)[sp] |
| | .[moe](T)[sp].[moe]([m5C])[sp].[moe](A)[sp].[moe](T)}$$$$V2.0 |
| 644 | RNA1{[moe](A)[sp].[moe](A)[sp].[moe](G)[sp].[moe](G)[sp].[moe](T)[s |
| | p].[moe](G)[sp].[moe](T)[sp].[moe](T)[sp].[moe]([m5C])[sp].[moe](T)[sp |
| | ].[moe](T)[sp].[moe](G)[sp].[moe](T)[sp].[moe](A)[sp].[moe]([m5C])[sp] |
| | .[moe](T)[sp].[moe](T)[sp].[moe]([m5C])[sp].[moe](A)}$$$$V2.0 |
| 645 | RNA1{[lna](G)[sp].[lna](T)[sp].[lna](T)[sp].[moe]([m5C])[sp].[moe](T)[s |
| | p].[moe](T)[sp].[moe](G)[sp].[moe](T)[sp].[moe](A)[sp].[moe]([m5C])[sp |
| | ].[moe](T)[sp].[moe](T)[sp].[moe]([m5C])[sp].[moe](A)[sp].[moe](T)[sp]. |
| | [moe]([m5C])[sp].[lna]([m5C])[sp].[lna]([m5C])[sp].[lna](A)}$$$$V2.0 |
| 646 | RNA1{[lna](T)[sp].[lna](G)[sp].[lna](T)[sp].[moe](T)[sp].[moe]([m5C])[s |
| | p].[moe](T)[sp].[moe](T)[sp].[moe](G)[sp].[moe](T)[sp].[moe](A)[sp].[m |
| | oe]([m5C])[sp].[moe](T)[sp].[moe](T)[sp].[moe]([m5C])[sp].[moe](A)[sp] |
| | .[moe](T)[sp].[lna]([m5C])[sp].[lna]([m5C])[sp].[lna]([m5C])}$$$$V2.0 |
| 647 | RNA1{[lna](G)[sp].[lna](T)[sp].[lna](G)[sp].[moe](T)[sp].[moe](T)[sp].[ |
| | moe]([m5C])[sp].[moe](T)[sp].[moe](T)[sp].[moe](G)[sp].[moe](T)[sp].[ |
| | moe](A)[sp].[moe]([m5C])[sp].[moe](T)[sp].[moe](T)[sp].[moe]([m5C])[s |
| | p].[moe](A)[sp].[lna](T)[sp].[lna]([m5C])[sp].[lna]([m5C])}$$$$V2.0 |
| 648 | RNA1{[lna](G)[sp].[lna](G)[sp].[lna](T)[sp].[moe](G)[sp].[moe](T)[sp].[ |
| | moe](T)[sp].[moe]([m5C])[sp].[moe](T)[sp].[moe](T)[sp].[moe](G)[sp].[ |
| | moe](T)[sp].[moe](A)[sp].[moe]([m5C])[sp].[moe](T)[sp].[moe](T)[sp].[ |
| | moe]([m5C])[sp].[lna](A)[sp].[lna](T)[sp].[lna]([m5C])}$$$$V2.0 |
| 649 | RNA1{[lna](A)[sp].[lna](G)[sp].[lna](G)[sp].[moe](T)[sp].[moe](G)[sp].[ |
| | moe](T)[sp].[moe](T)[sp].[moe]([m5C])[sp].[moe](T)[sp].[moe](T)[sp].[ |
| | moe](G)[sp].[moe](T)[sp].[moe](A)[sp].[moe]([m5C])[sp].[moe](T)[sp].[ |
| | moe](T)[sp].[lna]([m5C])[sp].[lna](A)[sp].[lna](T)}$$$$V2.0 |
| 650 | RNA1{[lna](A)[sp].[lna](A)[sp].[lna](G)[sp].[moe](G)[sp].[moe](T)[sp].[ |
| | moe](G)[sp].[moe](T)[sp].[moe](T)[sp].[moe]([m5C])[sp].[moe](T)[sp].[ |
| | moe](T)[sp].[moe](G)[sp].[moe](T)[sp].[moe](A)[sp].[moe]([m5C])[sp].[ |
| | moe](T)[sp].[lna](T)[sp].[lna]([m5C])[sp].[lna](A)}$$$$V2.0 |
| 651 | RNA1{[moe](T)[sp].[moe](G)[sp].[moe](T)[sp].[moe](T)[sp].[moe]([m5C |
| | ])[sp].[moe](T)[sp].[moe](T)[sp].[moe](G)[sp].[moe](T)[sp].[moe](A)[sp]. |
| | [moe]([m5C])[sp].[moe](T)[sp].[moe](T)[sp].[moe]([m5C])[sp].[moe](A)[ |
| | sp].[moe](T)[sp].[moe]([m5C])[sp].[moe]([m5C])[sp].[moe]([m5C])[sp].[ |
| | moe](A)}$$$$V2.0 |
| 652 | RNA1{[moe](G)[sp].[moe](T)[sp].[moe](G)[sp].[moe](T)[sp].[moe](T)[sp |
| | ].[moe]([m5C])[sp].[moe](T)[sp].[moe](T)[sp].[moe](G)[sp].[moe](T)[sp]. |
| | [moe](A)[sp].[moe]([m5C])[sp].[moe](T)[sp].[moe](T)[sp].[moe]([m5C])[ |
| | sp].[moe](A)[sp].[moe](T)[sp].[moe]([m5C])[sp].[moe]([m5C])[sp].[moe] |
| | ([m5C])}$$$$V2.0 |
| 653 | RNA1{[lna](T)[sp].[lna](G)[sp].[lna](T)[sp].[moe](T)[sp].[moe]([m5C])[s |
| | p].[moe](T)[sp].[moe](T)[sp].[moe](G)[sp].[moe](T)[sp].[moe](A)[sp].[m |
| | oe]([m5C])[sp].[moe](T)[sp].[moe](T)[sp].[moe]([m5C])[sp].[moe](A)[sp] |
| | .[moe](T)[sp].[moe]([m5C])[sp].[lna]([m5C])[sp].[lna]([m5C])[sp].[lna](A |
| | )}$$$$V2.0 |
| 654 | RNA1{[lna](G)[sp].[lna](T)[sp].[lna](G)[sp].[moe](T)[sp].[moe](T)[sp].[ |
| | moe]([m5C])[sp].[moe](T)[sp].[moe](T)[sp].[moe](G)[sp].[moe](T)[sp].[ |
| | moe](A)[sp].[moe]([m5C])[sp].[moe](T)[sp].[moe](T)[sp].[moe]([m5C])[s |
| | p].[moe](A)[sp].[moe](T)[sp].[lna]([m5C])[sp].[lna]([m5C])[sp].[lna]([m5 |
| | C])}$$$$V2.0 |
| 655 | RNA1{[moe](A)[sp].[moe](G)[sp].[moe]([m5C])[sp].[moe]([m5C])[sp].[ |
| | moe](A)[sp].[moe](T)[sp].[moe](T)[sp].[moe](G)[sp].[moe](T)[sp].[moe]( |
| | G)[sp].[moe](T)[sp].[moe](T)[sp].[moe](G)[sp].[moe](A)[sp].[moe](A)[sp |
| | ].[moe](T)[sp].[moe]([m5C])[sp].[moe]([m5C])[sp].[moe](T)[sp].[moe](G |
| | )[sp].[moe](T)[sp].[moe](T)[sp].[moe]([m5C])[sp].[moe](T)[sp].[moe](T)[ |
| | sp].[moe](G)[sp].[moe](T)[sp].[moe](A)[sp].[moe]([m5C])[sp].[moe](T)[s |
| | p].[moe](T)[sp].[moe]([m5C])[sp].[moe](A)[sp].[moe](T)[sp].[moe]([m5C |
| | ])[sp].[moe]([m5C])}$$$$V2.0 |
| 656 | RNA1{[moe](T)[sp].[moe](G)[sp].[moe](T)[sp].[moe](T)[sp].[moe]([m5C |
| | ])[sp].[moe](T)[sp].[moe](T)[sp].[moe](G)[sp].[moe](T)[sp].[moe](A)[sp]. |
| | [moe]([m5C])[sp].[moe](T)[sp].[moe](T)[sp].[moe]([m5C])[sp].[moe](A)[ |
| | sp].[moe](T)[sp].[moe]([m5C])[sp].[moe]([m5C])[sp].[moe](A)[sp].[moe] |
| | (G)[sp].[moe]([m5C])[sp].[moe]([m5C])[sp].[moe](A)[sp].[moe](T)[sp].[ |
| | moe](T)[sp].[moe](G)[sp].[moe](T)[sp].[moe](G)[sp].[moe](T)[sp].[moe]( |
| | T)[sp].[moe](G)[sp].[moe](A)[sp].[moe](A)[sp].[moe](T)[sp].[moe]([m5C |
| | ])[sp].[moe]([m5C])}$$$$V2.0 |
| 657 | RNA1{[moe]([m5C])[sp].[moe]([m5C])[sp].[moe](A)[sp].[moe](T)[sp].[ |
| | moe](T)[sp].[moe](G)[sp].[moe](T)[sp].[moe](G)[sp].[moe](T)[sp].[moe]( |
| | T)[sp].[moe](G)[sp].[moe](A)[sp].[moe](A)[sp].[moe](T)[sp].[moe]([m5C |
| | ])[sp].[moe]([m5C])[sp].[moe](G)[sp].[moe](T)[sp].[moe](T)[sp].[moe]([ |
| | m5C])[sp].[moe](T)[sp].[moe](T)[sp].[moe](G)[sp].[moe](T)[sp].[moe](A |
| | )[sp].[moe]([m5C])[sp].[moe](T)[sp].[moe](T)[sp].[moe]([m5C])[sp].[moe |
| | ](A)[sp].[moe](T)[sp].[moe]([m5C])}$$$$V2.0 |
| 658 | RNA1{[moe](G)[sp].[moe](T)[sp].[moe](T)[sp].[moe]([m5C])[sp].[moe]( |
| | T)[sp].[moe](T)[sp].[moe](G)[sp].[moe](T)[sp].[moe](A)[sp].[moe]([m5C |
| | ])[sp].[moe](T)[sp].[moe](T)[sp].[moe]([m5C])[sp].[moe](A)[sp].[moe](T |
| | )[sp].[moe]([m5C])[sp].[moe]([m5C])[sp].[moe]([m5C])[sp].[moe](A)[sp] |
| | .[moe](T)[sp].[moe](T)[sp].[moe](G)[sp].[moe](T)[sp].[moe](G)[sp].[moe |
| | ](T)[sp].[moe](T)[sp].[moe](G)[sp].[moe](A)[sp].[moe](A)[sp].[moe](T)[s |
| | p].[moe]([m5C])[sp].[moe]([m5C])}$$$$V2.0 |
| 659 | RNA1{[moe](A)[sp].[moe](T)[sp].[moe](T)[sp].[moe](G)[sp].[moe](T)[sp |
| | ].[moe](G)[sp].[moe](T)[sp].[moe](T)[sp].[moe](G)[sp].[moe](A)[sp].[mo |
| | e](A)[sp].[moe](T)[sp].[moe]([m5C])[sp].[moe]([m5C])[sp].[moe](G)[sp]. |
| | [moe](T)[sp].[moe](T)[sp].[moe]([m5C])[sp].[moe](T)[sp].[moe](T)[sp].[ |
| | moe](G)[sp].[moe](T)[sp].[moe](A)[sp].[moe]([m5C])[sp].[moe](T)[sp].[ |
| | moe](T)[sp].[moe]([m5C])[sp].[moe](A)}$$$$V2.0 |
| 660 | RNA1{[moe](G)[sp].[moe](T)[sp].[moe](T)[sp].[moe]([m5C])[sp].[moe]( |
| | T)[sp].[moe](T)[sp].[moe](G)[sp].[moe](T)[sp].[moe](A)[sp].[moe]([m5C |
| | ])[sp].[moe](T)[sp].[moe](T)[sp].[moe]([m5C])[sp].[moe](A)[sp].[moe](A |
| | )[sp].[moe](T)[sp].[moe](T)[sp].[moe](G)[sp].[moe](T)[sp].[moe](G)[sp].[ |
| | moe](T)[sp].[moe](T)[sp].[moe](G)[sp].[moe](A)[sp].[moe](A)[sp].[moe]( |
| | T)[sp].[moe]([m5C])[sp].[moe]([m5C])}$$$$V2.0 |
| 661 | RNA1{[moe](T)[sp].[moe]([m5C])[sp].[moe](T)[sp].[moe](T)[sp].[moe]( |
| | G)[sp].[moe](T)[sp].[moe](A)[sp].[moe]([m5C])[sp].[moe](T)[sp].[moe]( |
| | T)[sp].[moe]([m5C])[sp].[moe](A)[sp].[moe](T)[sp].[moe](G)[sp].[moe]( |
| | T)[sp].[moe](G)[sp].[moe](T)[sp].[moe](T)[sp].[moe](G)[sp].[moe](A)[sp |
| | ].[moe](A)[sp].[moe](T)[sp].[moe]([m5C])[sp].[moe]([m5C])}$$$$V2.0 |
| 662 | RNA1{[moe](T)[sp].[moe]([m5C])[sp].[moe](T)[sp].[moe](T)[sp].[moe]( |
| | G)[sp].[moe](T)[sp].[moe](A)[sp].[moe]([m5C])[sp].[moe](T)[sp].[moe]( |
| | T)[sp].[moe]([m5C])[sp].[moe](A)[sp].[moe](T)[sp].[moe](T)[sp].[moe]( |
| | G)[sp].[moe](T)[sp].[moe](G)[sp].[moe](T)[sp].[moe](T)[sp].[moe](G)[sp |
| | ].[moe](A)[sp].[moe](A)[sp].[moe](T)[sp].[moe]([m5C])}$$$$V2.0 |
| 663 | RNA1{[moe](T)[sp].[moe]([m5C])[sp].[moe](T)[sp].[moe](T)[sp].[moe]( |
| | G)[sp].[moe](T)[sp].[moe](A)[sp].[moe]([m5C])[sp].[moe](T)[sp].[moe]( |
| | T)[sp].[moe]([m5C])[sp].[moe](A)[sp].[moe](A)[sp].[moe](T)[sp].[moe]( |
| | T)[sp].[moe]([m5C])[sp].[moe](A)[sp].[moe](A)[sp].[moe]([m5C])[sp].[m |
| | oe](A)[sp].[moe]([m5C])[sp].[moe](A)[sp].[moe](A)[sp].[moe](T)}$$$$V |
| | 2.0 |
| 664 | RNA1{[moe](T)[sp].[moe](T)[sp].[moe]([m5C])[sp].[moe](T)[sp].[moe]( |
| | T)[sp].[moe](G)[sp].[moe](T)[sp].[moe](A)[sp].[moe]([m5C])[sp].[moe]( |
| | T)[sp].[moe](T)[sp].[moe]([m5C])[sp].[moe](T)[sp].[moe](G)[sp].[moe](T |
| | )[sp].[moe](G)[sp].[moe](T)[sp].[moe](T)[sp].[moe](G)[sp].[moe](A)[sp]. |
| | [moe](A)[sp].[moe](T)[sp].[moe]([m5C])[sp].[moe]([m5C])}$$$$V2.0 |
| 665 | RNA1{[moe](T)[sp].[moe](T)[sp].[moe]([m5C])[sp].[moe](T)[sp].[moe]( |
| | T)[sp].[moe](G)[sp].[moe](T)[sp].[moe](A)[sp].[moe]([m5C])[sp].[moe]( |
| | T)[sp].[moe](T)[sp].[moe]([m5C])[sp].[moe](T)[sp].[moe](T)[sp].[moe](G |
| | )[sp].[moe](T)[sp].[moe](G)[sp].[moe](T)[sp].[moe](T)[sp].[moe](G)[sp].[ |
| | moe](A)[sp].[moe](A)[sp].[moe](T)[sp].[moe]([m5C])}$$$$V2.0 |
| 666 | RNA1{[moe](T)[sp].[moe](T)[sp].[moe]([m5C])[sp].[moe](T)[sp].[moe]( |
| | T)[sp].[moe](G)[sp].[moe](T)[sp].[moe](A)[sp].[moe]([m5C])[sp].[moe]( |
| | T)[sp].[moe](T)[sp].[moe]([m5C])[sp].[moe](A)[sp].[moe](T)[sp].[moe](T |
| | )[sp].[moe]([m5C])[sp].[moe](A)[sp].[moe](A)[sp].[moe]([m5C])[sp].[mo |
| | e](A)[sp].[moe]([m5C])[sp].[moe](A)[sp].[moe](A)[sp].[moe](T)}$$$$V2 |
| | 0 |
| 667 | RNA1{[moe](G)[sp].[moe](T)[sp].[moe](T)[sp].[moe]([m5C])[sp].[moe]( |
| | T)[sp].[moe](T)[sp].[moe](G)[sp].[moe](T)[sp].[moe](A)[sp].[moe]([m5C |
| | ])[sp].[moe](T)[sp].[moe](T)[sp].[moe](T)[sp].[moe](G)[sp].[moe](T)[sp]. |
| | [moe](G)[sp].[moe](T)[sp].[moe](T)[sp].[moe](G)[sp].[moe](A)[sp].[moe] |
| | (A)[sp].[moe](T)[sp].[moe]([m5C])[sp].[moe]([m5C])}$$$$V2.0 |
| 668 | RNA1{[moe](G)[sp].[moe](T)[sp].[moe](T)[sp].[moe]([m5C])[sp].[moe]( |
| | T)[sp].[moe](T)[sp].[moe](G)[sp].[moe](T)[sp].[moe](A)[sp].[moe]([m5C |
| | ])[sp].[moe](T)[sp].[moe](T)[sp].[moe](T)[sp].[moe](T)[sp].[moe](G)[sp]. |
| | [moe](T)[sp].[moe](G)[sp].[moe](T)[sp].[moe](T)[sp].[moe](G)[sp].[moe] |
| | (A)[sp].[moe](A)[sp].[moe](T)[sp].[moe]([m5C])}$$$$V2.0 |
| 669 | RNA1{[moe](G)[sp].[moe](T)[sp].[moe](T)[sp].[moe]([m5C])[sp].[moe]( |
| | T)[sp].[moe](T)[sp].[moe](G)[sp].[moe](T)[sp].[moe](A)[sp].[moe]([m5C |
| | ])[sp].[moe](T)[sp].[moe](T)[sp].[moe](A)[sp].[moe](T)[sp].[moe](T)[sp]. |
| | [moe]([m5C])[sp].[moe](A)[sp].[moe](A)[sp].[moe]([m5C])[sp].[moe](A) |
| | [sp].[moe]([m5C])[sp].[moe](A)[sp].[moe](A)[sp].[moe](T)}$$$$V2.0 |
| 670 | RNA1{[moe](T)[sp].[moe](G)[sp].[moe](T)[sp].[moe](G)[sp].[moe](T)[sp |
| | ].[moe](T)[sp].[moe](G)[sp].[moe](A)[sp].[moe](A)[sp].[moe](T)[sp].[mo |
| | e]([m5C])[sp].[moe]([m5C])[sp].[moe](T)[sp].[moe]([m5C])[sp].[moe](T) |
| | [sp].[moe](T)[sp].[moe](G)[sp].[moe](T)[sp].[moe](A)[sp].[moe]([m5C])[ |
| | sp].[moe](T)[sp].[moe](T)[sp].[moe]([m5C])[sp].[moe](A)}$$$$V2.0 |
| 671 | RNA1{[moe](T)[sp].[moe](G)[sp].[moe](T)[sp].[moe](G)[sp].[moe](T)[sp |
| | ].[moe](T)[sp].[moe](G)[sp].[moe](A)[sp].[moe](A)[sp].[moe](T)[sp].[mo |
| | e]([m5C])[sp].[moe]([m5C])[sp].[moe](T)[sp].[moe](T)[sp].[moe]([m5C]) |
| | [sp].[moe](T)[sp].[moe](T)[sp].[moe](G)[sp].[moe](T)[sp].[moe](A)[sp].[ |
| | moe]([m5C])[sp].[moe](T)[sp].[moe](T)[sp].[moe]([m5C])}$$$$V2.0 |
| 672 | RNA1{[moe](T)[sp].[moe](G)[sp].[moe](T)[sp].[moe](G)[sp].[moe](T)[sp |
| | ].[moe](T)[sp].[moe](G)[sp].[moe](A)[sp].[moe](A)[sp].[moe](T)[sp].[mo |
| | e]([m5C])[sp].[moe]([m5C])[sp].[moe](G)[sp].[moe](T)[sp].[moe](T)[sp]. |
| | [moe]([m5C])[sp].[moe](T)[sp].[moe](T)[sp].[moe](G)[sp].[moe](T)[sp].[ |
| | moe](A)[sp].[moe]([m5C])[sp].[moe](T)[sp].[moe](T)}$$$$V2.0 |
| 673 | RNA1{[moe](T)[sp].[moe](T)[sp].[moe](G)[sp].[moe](T)[sp].[moe](G)[sp |
| | ].[moe](T)[sp].[moe](T)[sp].[moe](G)[sp].[moe](A)[sp].[moe](A)[sp].[mo |
| | e](T)[sp].[moe]([m5C])[sp].[moe](T)[sp].[moe]([m5C])[sp].[moe](T)[sp].[ |
| | moe](T)[sp].[moe](G)[sp].[moe](T)[sp].[moe](A)[sp].[moe]([m5C])[sp].[ |
| | moe](T)[sp].[moe](T)[sp].[moe]([m5C])[sp].[moe](A)}$$$$V2.0 |
| 674 | RNA1{[moe](T)[sp].[moe](T)[sp].[moe](G)[sp].[moe](T)[sp].[moe](G)[sp |
| | ].[moe](T)[sp].[moe](T)[sp].[moe](G)[sp].[moe](A)[sp].[moe](A)[sp].[mo |
| | e](T)[sp].[moe]([m5C])[sp].[moe](T)[sp].[moe](T)[sp].[moe]([m5C])[sp].[ |
| | moe](T)[sp].[moe](T)[sp].[moe](G)[sp].[moe](T)[sp].[moe](A)[sp].[moe]( |
| | [m5C])[sp].[moe](T)[sp].[moe](T)[sp].[moe]([m5C])}$$$$V2.0 |
| 675 | RNA1{[moe](T)[sp].[moe](T)[sp].[moe](G)[sp].[moe](T)[sp].[moe](G)[sp |
| | ].[moe](T)[sp].[moe](T)[sp].[moe](G)[sp].[moe](A)[sp].[moe](A)[sp].[mo |
| | e](T)[sp].[moe]([m5C])[sp].[moe](G)[sp].[moe](T)[sp].[moe](T)[sp].[moe |
| | ]([m5C])[sp].[moe](T)[sp].[moe](T)[sp].[moe](G)[sp].[moe](T)[sp].[moe] |
| | (A)[sp].[moe]([m5C])[sp].[moe](T)[sp].[moe](T)}$$$$V2.0 |
| 676 | RNA1{[moe](A)[sp].[moe](T)[sp].[moe](T)[sp].[moe]([m5C])[sp].[moe]( |
| | A)[sp].[moe](A)[sp].[moe]([m5C])[sp].[moe](A)[sp].[moe]([m5C])[sp].[m |
| | oe](A)[sp].[moe](A)[sp].[moe](T)[sp].[moe](T)[sp].[moe]([m5C])[sp].[mo |
| | e](T)[sp].[moe](T)[sp].[moe](G)[sp].[moe](T)[sp].[moe](A)[sp].[moe]([m |
| | 5C])[sp].[moe](T)[sp].[moe](T)[sp].[moe]([m5C])[sp].[moe](A)}$$$$V2. |
| | 0 |
| 677 | RNA1{[moe](T)[sp].[moe](G)[sp].[moe](T)[sp].[moe](T)[sp].[moe]([m5C |
| | ])[sp].[moe](T)[sp].m(U)[sp].m(G)[sp].[moe](T)[sp].[moe](A)[sp].[moe]([ |
| | m5C])[sp].[moe](T)[sp].[moe](T)[sp].m(C)[sp].m(A)[sp].[moe](T)[sp].[m |
| | oe]([m5C])[sp].[moe]([m5C])}$$$$V2.0 |
| 678 | RNA1{[moe](T)[sp].[moe](G)[sp].[moe](T)[sp].[moe](T)[sp].[moe]([m5C |
| | ])[sp].[moe](T)[sp].m(U)[sp].m(G)[sp].[moe](T)[sp].[moe](A)[sp].[moe]([ |
| | m5C])[sp].[moe](T)[sp].[moe](T)[sp].[moe]([m5C])[sp].m(A)[sp].[moe]( |
| | T)[sp].[moe]([m5C])[sp].[moe]([m5C])}$$$$V2.0 |
| 679 | RNA1{[moe](T)[sp].[moe](G)[sp].[moe](T)[sp].[moe](T)[sp].[moe]([m5C |
| | ])[sp].[moe](T)[sp].[lna](T)[sp].[lna](G)[sp].[moe](T)[sp].[moe](A)[sp].[ |
| | moe]([m5C])[sp].[moe](T)[sp].[moe](T)[sp].[lna]([m5C])[sp].[lna](A)[sp] |
| | .[moe](T)[sp].[moe]([m5C])[sp].[moe]([m5C])}$$$$V2.0 |
| 680 | RNA1{[moe](T)[sp].[moe](G)[sp].[moe](T)[sp].[moe](T)[sp].[moe]([m5C |
| | ])[sp].[moe](T)[sp].[lna](T)[sp].[lna](G)[sp].[moe](T)[sp].[moe](A)[sp].[ |
| | moe]([m5C])[sp].[moe](T)[sp].[moe](T)[sp].[moe]([m5C])[sp].[moe](A)[s |
| | p].[moe](T)[sp].[moe]([m5C])[sp].[moe]([m5C])}$$$$V2.0 |
| 681 | RNA1{[moe](T)[sp].[moe](G)[sp].[moe](T)[sp].[moe](T)[sp].[moe]([m5C |
| | ])[sp].[moe](T)[sp].[moe](T)[sp].[moe](G)[sp].[moe](T)[sp].[moe](A)[sp]. |
| | [moe]([m5C])[sp].[moe](T)[sp].[moe](T)[sp].[lna]([m5C])[sp].[lna](A)[sp |
| | ].[moe](T)[sp].[moe]([m5C])[sp].[moe]([m5C])}$$$$V2.0 |
| 682 | RNA1{[moe](T)[sp].[moe](G)[sp].[moe](T)[sp].[moe](T)[sp].[moe]([m5C |
| | ])[sp].[moe](T)[sp].[moe](T)[sp].[lna](G)[sp].[moe](T)[sp].[moe](A)[sp].[ |
| | moe]([m5C])[sp].[moe](T)[sp].[moe](T)[sp].[lna]([m5C])[sp].[moe](A)[sp |
| | ].[moe](T)[sp].[moe]([m5C])[sp].[moe]([m5C])}$$$$V2.0 |
| 683 | RNA1{[moe](T)[sp].[moe](G)[sp].[moe](T)[sp].[moe](T)[sp].[moe]([m5C |
| | ])[sp].[moe](T)[sp].[lna](T)[sp].[moe](G)[sp].[moe](T)[sp].[moe](A)[sp].[ |
| | moe]([m5C])[sp].[moe](T)[sp].[moe](T)[sp].[moe]([m5C])[sp].[lna](A)[sp |
| | ].[moe](T)[sp].[moe]([m5C])[sp].[moe]([m5C])}$$$$V2.0 |
| 684 | RNA1{[moe](T)[sp].[moe](G)[sp].[moe](T)[sp].[moe](T)[sp].[moe]([m5C |
| | ])[sp].[moe](T)[sp].[lna](T)[sp].[lna](G)[sp].[lna](T)[sp].[lna](A)[sp].[lna] |
| | ([m5C])[sp].[lna](T)[sp].[lna](T)[sp].[lna]([m5C])[sp].[lna](A)[sp].[moe]( |
| | T)[sp].[moe]([m5C])[sp].[moe]([m5C])}$$$$V2.0 |
| 685 | RNA1{[moe](T)[sp].[moe](G)[sp].[moe](T)[sp].[moe](T)[sp].[moe]([m5C |
| | ])[sp].[moe](T)[sp].m(U)[sp].m(G)[sp].m(U)[sp].m(A)[sp].m(C)[sp].m(U) |
| | [sp].m(U)[sp].m(C)[sp].m(A)[sp].[moe](T)[sp].[moe]([m5C])[sp].[moe]([ |
| | m5C])}$$$$V2.0 |
| 686 | RNA1{[lna](T)[sp].[lna](G)[sp].[moe](T)[sp].[moe](T)[sp].[moe]([m5C])[ |
| | sp].[moe](T)[sp].m(U)[sp].m(G)[sp].[moe](T)[sp].[moe](A)[sp].[moe]([m |
| | 5C])[sp].[moe](T)[sp].[moe](T)[sp].m(C)[sp].m(A)[sp].[moe](T)[sp].[lna] |
| | ([m5C])[sp].[lna]([m5C])}$$$$V2.0 |
| 687 | RNA1{[lna](T)[sp].[lna](G)[sp].[moe](T)[sp].[moe](T)[sp].[moe]([m5C])[ |
| | sp].[moe](T)[sp].m(U)[sp].m(G)[sp].[moe](T)[sp].[moe](A)[sp].[moe]([m |
| | 5C])[sp].[moe](T)[sp].[moe](T)[sp].[moe]([m5C])[sp].m(A)[sp].[moe](T)[ |
| | sp].[lna]([m5C])[sp].[lna]([m5C])}$$$$V2.0 |
| 688 | RNA1{[lna](T)[sp].[lna](G)[sp].[moe](T)[sp].[moe](T)[sp].[moe]([m5C])[ |
| | sp].[moe](T)[sp].[lna](T)[sp].[lna](G)[sp].[moe](T)[sp].[moe](A)[sp].[moe |
| | ]([m5C])[sp].[moe](T)[sp].[moe](T)[sp].[lna]([m5C])[sp].[lna](A)[sp].[mo |
| | e](T)[sp].[lna]([m5C])[sp].[lna]([m5C])}$$$$V2.0 |
| 689 | RNA1{[lna](T)[sp].[lna](G)[sp].[moe](T)[sp].[moe](T)[sp].[moe]([m5C])[ |
| | sp].[moe](T)[sp].[lna](T)[sp].[lna](G)[sp].[moe](T)[sp].[moe](A)[sp].[moe |
| | ]([m5C])[sp].[moe](T)[sp].[moe](T)[sp].[moe]([m5C])[sp].[moe](A)[sp].[ |
| | moe](T)[sp].[lna]([m5C])[sp].[lna]([m5C])}$$$$V2.0 |
| 690 | RNA1{[lna](T)[sp].[lna](G)[sp].[moe](T)[sp].[moe](T)[sp].[moe]([m5C])[ |
| | sp].[moe](T)[sp].[moe](T)[sp].[moe](G)[sp].[moe](T)[sp].[moe](A)[sp].[ |
| | moe]([m5C])[sp].[moe](T)[sp].[moe](T)[sp].[lna]([m5C])[sp].[lna](A)[sp] |
| | .[moe](T)[sp].[lna]([m5C])[sp].[lna]([m5C])}$$$$V2.0 |
| 691 | RNA1{[lna](T)[sp].[lna](G)[sp].[moe](T)[sp].[moe](T)[sp].[moe]([m5C])[ |
| | sp].[moe](T)[sp].[moe](T)[sp].[lna](G)[sp].[moe](T)[sp].[moe](A)[sp].[m |
| | oe]([m5C])[sp].[moe](T)[sp].[moe](T)[sp].[lna]([m5C])[sp].[moe](A)[sp]. |
| | [moe](T)[sp].[lna]([m5C])[sp].[lna]([m5C])}$$$$V2.0 |
| 692 | RNA1{[lna](T)[sp].[lna](G)[sp].[moe](T)[sp].[moe](T)[sp].[moe]([m5C])[ |
| | sp].[moe](T)[sp].[lna](T)[sp].[moe](G)[sp].[moe](T)[sp].[moe](A)[sp].[m |
| | oe]([m5C])[sp].[moe](T)[sp].[moe](T)[sp].[moe]([m5C])[sp].[lna](A)[sp]. |
| | [moe](T)[sp].[lna]([m5C])[sp].[lna]([m5C])}$$$$V2.0 |
| 693 | RNA1{[lna](T)[sp].[lna](G)[sp].[moe](T)[sp].[moe](T)[sp].[moe]([m5C])[ |
| | sp].[moe](T)[sp].[lna](T)[sp].[lna](G)[sp].[lna](T)[sp].[lna](A)[sp].[lna]([ |
| | m5C])[sp].[lna](T)[sp].[lna](T)[sp].[lna]([m5C])[sp].[lna](A)[sp].[moe](T) |
| | [sp].[lna]([m5C])[sp].[lna]([m5C])}$$$$V2.0 |
| 694 | RNA1{[lna](T)[sp].[lna](G)[sp].[moe](T)[sp].[moe](T)[sp].[moe]([m5C])[ |
| | sp].[moe](T)[sp].m(U)[sp].m(G)[sp].m(U)[sp].m(A)[sp].m(C)[sp].m(U)[s |
| | p].m(U)[sp].m(C)[sp].m(A)[sp].[moe](T)[sp].[lna]([m5C])[sp].[lna]([m5C |
| | ])}$$$$V2.0 |
| 695 | RNA1{[moe](T)[sp].[moe](G)[sp].[moe](T)[sp].[moe](T)[sp].[moe]([m5C |
| | ])[sp].[moe](T)[sp].m(U)[sp].m(G)[sp].m(U)[sp].m(A)[sp].[moe]([m5C])[ |
| | sp].m(U)[sp].m(U)[sp].[moe]([m5C])[sp].m(A)[sp].[moe](T)[sp].[moe]([ |
| | m5C])[sp].[moe]([m5C])}$$$$V2.0 |
| 696 | RNA1{[lna](T)[sp].[lna](G)[sp].[moe](T)[sp].[moe](T)[sp].[moe]([m5C])[ |
| | sp].[moe](T)[sp].m(U)[sp].m(G)[sp].m(U)[sp].m(A)[sp].[moe]([m5C])[sp] |
| | .m(U)[sp].m(U)[sp].[moe]([m5C])[sp].m(A)[sp].[moe](T)[sp].[lna]([m5C] |
| | )[sp].[lna]([m5C])}$$$$V2.0 |
| 697 | RNA1{[lna](G)[sp].[moe](T)[sp].[moe](T)[sp].[moe]([m5C])[sp].[moe](T |
| | )[sp].[moe](T)[sp].[moe](G)[sp].[moe](T)[sp].[moe](A)[sp].[moe]([m5C]) |
| | [sp].[moe](T)[sp].[moe](T)[sp].[moe]([m5C])[sp].[moe](A)[sp].[moe](T)[ |
| | sp].[moe]([m5C])[sp].[lna]([m5C])}$$$$V2.0 |
| 698 | RNA1{[lna](G)[sp].[lna](T)[sp].[moe](T)[sp].[moe]([m5C])[sp].[moe](T)[ |
| | sp].[moe](T)[sp].[moe](G)[sp].[moe](T)[sp].[moe](A)[sp].[moe]([m5C])[s |
| | p].[moe](T)[sp].[moe](T)[sp].[moe]([m5C])[sp].[moe](A)[sp].[moe](T)[sp |
| | ].[lna]([m5C])[sp].[lna]([m5C])}$$$$V2.0 |
| 699 | RNA1{[lna](G)[sp].[moe](T)[sp].[moe](T)[sp].[moe]([m5C])[sp].[moe](T |
| | )[sp].[moe](T)[sp].[moe](G)[sp].[moe](T)[sp].[moe](A)[sp].[moe]([m5C]) |
| | [sp].[moe](T)[sp].[moe](T)[sp].[moe]([m5C])[sp].[moe](A)[sp].[moe](T)[ |
| | sp].[lna]([m5C])[sp].[lna]([m5C])}$$$$V2.0 |
| 700 | RNA1{[lna](G)[sp].[lna](T)[sp].[moe](T)[sp].[moe]([m5C])[sp].[moe](T)[ |
| | sp].[moe](T)[sp].[moe](G)[sp].[moe](T)[sp].[moe](A)[sp].[moe]([m5C])[s |
| | p].[moe](T)[sp].[moe](T)[sp].[moe]([m5C])[sp].[moe](A)[sp].[moe](T)[sp |
| | ].[moe]([m5C])[sp].[lna]([m5C])}$$$$V2.0 |
| 701 | RNA1{[moe](G)[sp].[moe](T)[sp].[lna](T)[sp].[lna]([m5C])[sp].[moe](T)[ |
| | sp].[moe](T)[sp].[moe](G)[sp].[moe](T)[sp].[moe](A)[sp].[moe]([m5C])[s |
| | p].[moe](T)[sp].[moe](T)[sp].[moe]([m5C])[sp].[lna](A)[sp].[lna](T)[sp].[ |
| | moe]([m5C])[sp].[moe]([m5C])}$$$$V2.0 |
| 702 | RNA1{[moe](G)[sp].[moe](T)[sp].[moe](T)[sp].[moe]([m5C])[sp].[lna](T |
| | )[sp].[lna](T)[sp].[moe](G)[sp].[moe](T)[sp].[moe](A)[sp].[moe]([m5C])[ |
| | sp].[moe](T)[sp].[lna](T)[sp].[lna]([m5C])[sp].[moe](A)[sp].[moe](T)[sp]. |
| | [moe]([m5C])[sp].[moe]([m5C])}$$$$V2.0 |
| 703 | RNA1{[moe](G)[sp].[moe](T)[sp].[moe](T)[sp].[moe]([m5C])[sp].[moe]( |
| | T)[sp].[moe](T)[sp].[lna](G)[sp].[lna](T)[sp].[moe](A)[sp].[lna]([m5C])[s |
| | p].[lna](T)[sp].[moe](T)[sp].[moe]([m5C])[sp].[moe](A)[sp].[moe](T)[sp]. |
| | [moe]([m5C])[sp].[moe]([m5C])}$$$$V2.0 |
| 704 | RNA1{[moe](G)[sp].[moe](T)[sp].[moe](T)[sp].[moe]([m5C])[sp].[lna](T |
| | )[sp].[lna](T)[sp].[moe](G)[sp].[lna](T)[sp].[lna](A)[sp].[moe]([m5C])[sp] |
| | .[moe](T)[sp].[moe](T)[sp].[moe]([m5C])[sp].[moe](A)[sp].[moe](T)[sp].[ |
| | moe]([m5C])[sp].[moe]([m5C])}$$$$V2.0 |
| 705 | RNA1{[moe](G)[sp].[moe](T)[sp].[moe](T)[sp].[moe]([m5C])[sp].[lna](T |
| | )[sp].[lna](T)[sp].[moe](G)[sp].[moe](T)[sp].[moe](A)[sp].[moe]([m5C])[ |
| | sp].[lna](T)[sp].[lna](T)[sp].[moe]([m5C])[sp].[moe](A)[sp].[moe](T)[sp]. |
| | [moe]([m5C])[sp].[moe]([m5C])}$$$$V2.0 |
| 706 | RNA1{[moe](G)[sp].[moe](T)[sp].[moe](T)[sp].[moe]([m5C])[sp].[lna](T |
| | )[sp].[lna](T)[sp].[moe](G)[sp].[moe](T)[sp].[moe](A)[sp].[moe]([m5C])[ |
| | sp].[moe](T)[sp].[moe](T)[sp].[moe]([m5C])[sp].[lna](A)[sp].[lna](T)[sp]. |
| | [moe]([m5C])[sp].[moe]([m5C])}$$$$V2.0 |
| 707 | RNA1{[moe](G)[sp].[moe](T)[sp].[moe](T)[sp].[moe]([m5C])[sp].[moe]( |
| | T)[sp].[moe](T)[sp].[moe](G)[sp].[lna](T)[sp].[lna](A)[sp].[moe]([m5C])[ |
| | sp].[lna](T)[sp].[lna](T)[sp].[moe]([m5C])[sp].[moe](A)[sp].[moe](T)[sp]. |
| | [moe]([m5C])[sp].[moe]([m5C])}$$$$V2.0 |
| 708 | RNA1{[moe](G)[sp].[moe](T)[sp].[moe](T)[sp].[moe]([m5C])[sp].[moe]( |
| | T)[sp].[moe](T)[sp].[moe](G)[sp].[lna](T)[sp].[lna](A)[sp].[moe]([m5C])[ |
| | sp].[moe](T)[sp].[moe](T)[sp].[moe]([m5C])[sp].[lna](A)[sp].[lna](T)[sp]. |
| | [moe]([m5C])[sp].[moe]([m5C])}$$$$V2.0 |
| 709 | RNA1{[moe](G)[sp].[moe](T)[sp].[moe](T)[sp].[moe]([m5C])[sp].[moe]( |
| | T)[sp].[moe](T)[sp].[moe](G)[sp].[moe](T)[sp].[moe](A)[sp].[moe]([m5C |
| | ])[sp].[lna](T)[sp].[lna](T)[sp].[moe]([m5C])[sp].[lna](A)[sp].[lna](T)[sp]. |
| | [moe]([m5C])[sp].[moe]([m5C])}$$$$V2.0 |
| 710 | RNA1{[moe](G)[sp].[moe](T)[sp].[lna](T)[sp].[lna]([m5C])[sp].[moe](T)[ |
| | sp].[lna](T)[sp].[moe](G)[sp].[moe](T)[sp].[moe](A)[sp].[moe]([m5C])[sp |
| | ].[moe](T)[sp].[moe](T)[sp].[moe]([m5C])[sp].[moe](A)[sp].[moe](T)[sp]. |
| | [moe]([m5C])[sp].[moe]([m5C])}$$$$V2.0 |
| 711 | RNA1{[lna](G)[sp].[moe](T)[sp].[lna](T)[sp].[moe]([m5C])[sp].[moe](T)[ |
| | sp].[moe](T)[sp].[moe](G)[sp].[moe](T)[sp].[moe](A)[sp].[moe]([m5C])[s |
| | p].[moe](T)[sp].[moe](T)[sp].[moe]([m5C])[sp].[moe](A)[sp].[moe](T)[sp |
| | ].[lna]([m5C])[sp].[moe]([m5C])}$$$$V2.0 |
| 712 | RNA1{[moe](G)[sp].[moe](T)[sp].[moe](T)[sp].[moe]([m5C])[sp].[lna](T |
| | )[sp].[lna](T)[sp].[moe](G)[sp].[moe](T)[sp].[moe](A)[sp].[moe]([m5C])[ |
| | sp].[lna](T)[sp].[moe](T)[sp].[moe]([m5C])[sp].[moe](A)[sp].[moe](T)[sp |
| | ].[moe]([m5C])[sp].[moe]([m5C])}$$$$V2.0 |
| 713 | RNA1{[moe](G)[sp].[moe](T)[sp].[moe](T)[sp].[moe]([m5C])[sp].[moe]( |
| | T)[sp].[moe](T)[sp].[moe](G)[sp].[moe](T)[sp].[moe](A)[sp].[moe]([m5C |
| | ])[sp].[lna](T)[sp].[moe](T)[sp].[lna]([m5C])[sp].[moe](A)[sp].[lna](T)[sp |
| | ].[moe]([m5C])[sp].[moe]([m5C])}$$$$V2.0 |
| 714 | RNA1{[moe](G)[sp].[moe](T)[sp].[moe](T)[sp].[moe]([m5C])[sp].[moe]( |
| | T)[sp].[moe](T)[sp].[moe](G)[sp].[moe](T)[sp].[lna](A)[sp].[moe]([m5C]) |
| | [sp].[moe](T)[sp].[moe](T)[sp].[moe]([m5C])[sp].[lna](A)[sp].[moe](T)[s |
| | p].[moe]([m5C])[sp].[lna]([m5C])}$$$$V2.0 |
| 715 | RNA1{[moe](G)[sp].[moe](T)[sp].[moe](T)[sp].[lna]([m5C])[sp].[moe](T |
| | )[sp].[moe](T)[sp].[moe](G)[sp].[lna](T)[sp].[moe](A)[sp].[moe]([m5C])[ |
| | sp].[lna](T)[sp].[moe](T)[sp].[moe]([m5C])[sp].[moe](A)[sp].[moe](T)[sp |
| | ].[moe]([m5C])[sp].[moe]([m5C])}$$$$V2.0 |
| 716 | RNA1{[moe](G)[sp].[moe](T)[sp].[moe](T)[sp].[moe]([m5C])[sp].[moe]( |
| | T)[sp].[lna](T)[sp].[moe](G)[sp].[moe](T)[sp].[lna](A)[sp].[moe]([m5C])[ |
| | sp].[moe](T)[sp].[lna](T)[sp].[moe]([m5C])[sp].[moe](A)[sp].[moe](T)[sp |
| | ].[moe]([m5C])[sp].[moe]([m5C])}$$$$V2.0 |
| 717 | RNA1{[moe](G)[sp].[moe](T)[sp].[lna](T)[sp].[moe]([m5C])[sp].[lna](T)[ |
| | sp].[moe](T)[sp].[moe](G)[sp].[moe](T)[sp].[moe](A)[sp].[moe]([m5C])[s |
| | p].[moe](T)[sp].[moe](T)[sp].[moe]([m5C])[sp].[moe](A)[sp].[moe](T)[sp |
| | ].[lna]([m5C])[sp].[moe]([m5C])}$$$$V2.0 |
| 718 | RNA1{[lna](T)[sp].[moe](G)[sp].[moe](T)[sp].[moe](T)[sp].[moe]([m5C] |
| | )[sp].[moe](T)[sp].[moe](T)[sp].[moe](G)[sp].[moe](T)[sp].[moe](A)[sp].[ |
| | moe]([m5C])[sp].[moe](T)[sp].[moe](T)[sp].[moe]([m5C])[sp].[moe](A)[s |
| | p].[lna](T)}$$$$V2.0 |
| 719 | RNA1{[lna](T)[sp].[moe](G)[sp].[moe](T)[sp].[moe](T)[sp].[moe]([m5C] |
| | )[sp].[moe](T)[sp].[moe](T)[sp].[moe](G)[sp].[moe](T)[sp].[moe](A)[sp].[ |
| | moe]([m5C])[sp].[moe](T)[sp].[moe](T)[sp].[moe]([m5C])[sp].[lna](A)[sp |
| | ].[lna](T)}$$$$V2.0 |
| 720 | RNA1{[lna](T)[sp].[lna](G)[sp].[moe](T)[sp].[moe](T)[sp].[moe]([m5C])[ |
| | sp].[moe](T)[sp].[moe](T)[sp].[moe](G)[sp].[moe](T)[sp].[moe](A)[sp].[ |
| | moe]([m5C])[sp].[moe](T)[sp].[moe](T)[sp].[moe]([m5C])[sp].[moe](A)[s |
| | p].[lna](T)}$$$$V2.0 |
| 721 | RNA1{[moe](T)[sp].[lna](G)[sp].[moe](T)[sp].[lna](T)[sp].[moe]([m5C])[ |
| | sp].[moe](T)[sp].[moe](T)[sp].[moe](G)[sp].[moe](T)[sp].[moe](A)[sp].[ |
| | moe]([m5C])[sp].[lna](T)[sp].[moe](T)[sp].[moe]([m5C])[sp].[moe](A)[sp |
| | ].[moe](T)}$$$$V2.0 |
| 722 | RNA1{[moe](T)[sp].[moe](G)[sp].[moe](T)[sp].[lna](T)[sp].[lna]([m5C])[ |
| | sp].[moe](T)[sp].[moe](T)[sp].[lna](G)[sp].[moe](T)[sp].[moe](A)[sp].[m |
| | oe]([m5C])[sp].[moe](T)[sp].[moe](T)[sp].[moe]([m5C])[sp].[moe](A)[sp] |
| | .[moe](T)}$$$$V2.0 |
| 723 | RNA1{[moe](T)[sp].[moe](G)[sp].[moe](T)[sp].[moe](T)[sp].[moe]([m5C |
| | ])[sp].[moe](T)[sp].[moe](T)[sp].[moe](G)[sp].[lna](T)[sp].[moe](A)[sp].[ |
| | lna]([m5C])[sp].[moe](T)[sp].[lna](T)[sp].[moe]([m5C])[sp].[moe](A)[sp] |
| | .[moe](T)}$$$$V2.0 |
| 724 | RNA1{[moe](T)[sp].[moe](G)[sp].[lna](T)[sp].[lna](T)[sp].[moe]([m5C])[ |
| | sp].[moe](T)[sp].[moe](T)[sp].[moe](G)[sp].[moe](T)[sp].[moe](A)[sp].[ |
| | moe]([m5C])[sp].[moe](T)[sp].[moe](T)[sp].[moe]([m5C])[sp].[moe](A)[s |
| | p].[lna](T)}$$$$V2.0 |
| 725 | RNA1{[lna](T)[sp].[moe](G)[sp].[lna](T)[sp].[moe](T)[sp].[moe]([m5C])[ |
| | sp].[moe](T)[sp].[moe](T)[sp].[moe](G)[sp].[moe](T)[sp].[lna](A)[sp].[m |
| | oe]([m5C])[sp].[moe](T)[sp].[moe](T)[sp].[moe]([m5C])[sp].[moe](A)[sp] |
| | .[moe](T)}$$$$V2.0 |
| 726 | RNA1{[moe](T)[sp].[moe](G)[sp].[moe](T)[sp].[moe](T)[sp].[moe]([m5C |
| | ])[sp].[moe](T)[sp].[moe](T)[sp].[lna](G)[sp].[moe](T)[sp].[lna](A)[sp].[ |
| | moe]([m5C])[sp].[lna](T)[sp].[moe](T)[sp].[moe]([m5C])[sp].[moe](A)[sp |
| | ].[moe](T)}$$$$V2.0 |
| 727 | RNA1{[moe](T)[sp].[moe](G)[sp].[lna](T)[sp].[moe](T)[sp].[moe]([m5C] |
| | )[sp].[moe](T)[sp].[lna](T)[sp].[moe](G)[sp].[moe](T)[sp].[moe](A)[sp].[l |
| | na]([m5C])[sp].[moe](T)[sp].[moe](T)[sp].[moe]([m5C])[sp].[moe](A)[sp] |
| | .[moe](T)}$$$$V2.0 |
| 728 | RNA1{[moe](T)[sp].[moe](G)[sp].[moe](T)[sp].[lna](T)[sp].[moe]([m5C] |
| | )[sp].[moe](T)[sp].[moe](T)[sp].[lna](G)[sp].[moe](T)[sp].[moe](A)[sp].[l |
| | na]([m5C])[sp].[moe](T)[sp].[moe](T)[sp].[lna]([m5C])[sp].[moe](A)[sp]. |
| | [moe](T)}$$$$V2.0 |
| 729 | RNA1{[lna](T)[sp].[moe](G)[sp].[moe](T)[sp].[lna](T)[sp].[moe]([m5C])[ |
| | sp].[moe](T)[sp].[moe](T)[sp].[moe](G)[sp].[moe](T)[sp].[lna](A)[sp].[lna |
| | ]([m5C])[sp].[moe](T)[sp].[moe](T)[sp].[moe]([m5C])[sp].[moe](A)[sp].[ |
| | moe](T)}$$$$V2.0 |
| 730 | RNA1{[lna](T)[sp].[moe](G)[sp].[moe](T)[sp].[moe](T)[sp].[moe]([m5C] |
| | )[sp].[moe](T)[sp].[moe](T)[sp].[moe](G)[sp].[lna](T)[sp].[moe](A)[sp].[ |
| | moe]([m5C])[sp].[lna](T)[sp].[moe](T)[sp].[lna]([m5C])[sp].[moe](A)[sp] |
| | .[moe](T)}$$$$V2.0 |
| 731 | RNA1{[lna](T)[sp].[moe](G)[sp].[moe](T)[sp].[moe](T)[sp].[moe]([m5C] |
| | )[sp].[lna](T)[sp].[lna](T)[sp].[moe](G)[sp].[moe](T)[sp].[lna](A)[sp].[mo |
| | e]([m5C])[sp].[moe](T)[sp].[moe](T)[sp].[moe]([m5C])[sp].[moe](A)[sp]. |
| | [moe](T)}$$$$V2.0 |
| 732 | RNA1{[moe](T)[sp].[moe](G)[sp].[moe](T)[sp].[moe](T)[sp].[lna]([m5C] |
| | )[sp].[lna](T)[sp].[moe](T)[sp].[lna](G)[sp].[moe](T)[sp].[moe](A)[sp].[ln |
| | a]([m5C])[sp].[moe](T)[sp].[moe](T)[sp].[moe]([m5C])[sp].[moe](A)[sp]. |
| | [moe](T)}$$$$V2.0 |
| 733 | RNA1{[moe](T)[sp].[lna](G)[sp].[moe](T)[sp].[moe](T)[sp].[moe]([m5C] |
| | )[sp].[moe](T)[sp].[moe](T)[sp].[moe](G)[sp].[lna](T)[sp].[lna](A)[sp].[m |
| | oe]([m5C])[sp].[moe](T)[sp].[moe](T)[sp].[moe]([m5C])[sp].[moe](A)[sp] |
| | .[lna](T)}$$$$V2.0 |
| 734 | RNA1{[moe](T)[sp].[lna](G)[sp].[lna](T)[sp].[lna](T)[sp].[moe]([m5C])[s |
| | p].[moe](T)[sp].[moe](T)[sp].[lna](G)[sp].[moe](T)[sp].[moe](A)[sp].[mo |
| | e]([m5C])[sp].[moe](T)[sp].[moe](T)[sp].[moe]([m5C])[sp].[moe](A)[sp]. |
| | [moe](T)}$$$$V2.0 |
| 735 | RNA1{[moe](T)[sp].[moe](G)[sp].[moe](T)[sp].[moe](T)[sp].[lna]([m5C] |
| | )[sp].[lna](T)[sp].[moe](T)[sp].[moe](G)[sp].[moe](T)[sp].[lna](A)[sp].[m |
| | oe]([m5C])[sp].[moe](T)[sp].[lna](T)[sp].[moe]([m5C])[sp].[moe](A)[sp]. |
| | [moe](T)}$$$$V2.0 |
| 736 | RNA1{[moe](T)[sp].[moe](G)[sp].[moe](T)[sp].[moe](T)[sp].[moe]([m5C |
| | ])[sp].[moe](T)[sp].[moe](T)[sp].[lna](G)[sp].[lna](T)[sp].[moe](A)[sp].[ |
| | moe]([m5C])[sp].[moe](T)[sp].[lna](T)[sp].[lna]([m5C])[sp].[moe](A)[sp] |
| | .[moe](T)}$$$$V2.0 |
| 737 | RNA1{[moe](T)[sp].[moe](G)[sp].[lna](T)[sp].[moe](T)[sp].[moe]([m5C] |
| | )[sp].[moe](T)[sp].[lna](T)[sp].[moe](G)[sp].[moe](T)[sp].[lna](A)[sp].[m |
| | oe]([m5C])[sp].[moe](T)[sp].[lna](T)[sp].[moe]([m5C])[sp].[moe](A)[sp]. |
| | [moe](T)}$$$$V2.0 |
| 738 | RNA1{[lna]([m5C])[sp].[moe](T)[sp].[moe](T)[sp].[moe](G)[sp].[moe](T |
| | )[sp].[moe](A)[sp].[moe]([m5C])[sp].[moe](T)[sp].[moe](T)[sp].[moe]([m |
| | 5C])[sp].[moe](A)[sp].[moe](T)[sp].[moe]([m5C])[sp].[moe]([m5C])[sp].[ |
| | lna]([m5C])}$$$$V2.0 |
| 739 | RNA1{[lna]([m5C])[sp].[lna](T)[sp].[moe](T)[sp].[moe](G)[sp].[moe](T)[ |
| | sp].[moe](A)[sp].[moe]([m5C])[sp].[moe](T)[sp].[moe](T)[sp].[moe]([m5 |
| | C])[sp].[moe](A)[sp].[moe](T)[sp].[moe]([m5C])[sp].[lna]([m5C])[sp].[ln |
| | a]([m5C])}$$$$V2.0 |
| 740 | RNA1{[lna]([m5C])[sp].[moe](T)[sp].[moe](T)[sp].[moe](G)[sp].[moe](T |
| | )[sp].[moe](A)[sp].[moe]([m5C])[sp].[moe](T)[sp].[moe](T)[sp].[moe]([m |
| | 5C])[sp].[moe](A)[sp].[moe](T)[sp].[moe]([m5C])[sp].[lna]([m5C])[sp].[l |
| | na]([m5C])}$$$$V2.0 |
| 741 | RNA1{[lna]([m5C])[sp].[lna](T)[sp].[moe](T)[sp].[moe](G)[sp].[moe](T)[ |
| | sp].[moe](A)[sp].[moe]([m5C])[sp].[moe](T)[sp].[moe](T)[sp].[moe]([m5 |
| | C])[sp].[moe](A)[sp].[moe](T)[sp].[moe]([m5C])[sp].[moe]([m5C])[sp].[l |
| | na]([m5C])}$$$$V2.0 |
| 742 | RNA1{[moe]([m5C])[sp].[lna](T)[sp].[moe](T)[sp].[moe](G)[sp].[moe](T |
| | )[sp].[lna](A)[sp].[lna]([m5C])[sp].[moe](T)[sp].[moe](T)[sp].[moe]([m5 |
| | C])[sp].[moe](A)[sp].[moe](T)[sp].[moe]([m5C])[sp].[moe]([m5C])[sp].[ |
| | moe]([m5C])}$$$$V2.0 |
| 743 | RNA1{[lna]([m5C])[sp].[moe](T)[sp].[moe](T)[sp].[moe](G)[sp].[lna](T)[ |
| | sp].[lna](A)[sp].[moe]([m5C])[sp].[moe](T)[sp].[moe](T)[sp].[moe]([m5C |
| | ])[sp].[moe](A)[sp].[moe](T)[sp].[moe]([m5C])[sp].[moe]([m5C])[sp].[mo |
| | e]([m5C])}$$$$V2.0 |
| 744 | RNA1{[moe]([m5C])[sp].[lna](T)[sp].[lna](T)[sp].[moe](G)[sp].[moe](T)[ |
| | sp].[moe](A)[sp].[lna]([m5C])[sp].[moe](T)[sp].[moe](T)[sp].[moe]([m5C |
| | ])[sp].[moe](A)[sp].[moe](T)[sp].[moe]([m5C])[sp].[moe]([m5C])[sp].[mo |
| | e]([m5C])}$$$$V2.0 |
| 745 | RNA1{[moe]([m5C])[sp].[moe](T)[sp].[moe](T)[sp].[lna](G)[sp].[moe](T |
| | )[sp].[lna](A)[sp].[moe]([m5C])[sp].[lna](T)[sp].[moe](T)[sp].[moe]([m5 |
| | C])[sp].[moe](A)[sp].[moe](T)[sp].[moe]([m5C])[sp].[moe]([m5C])[sp].[ |
| | moe]([m5C])}$$$$V2.0 |
| 746 | RNA1{[moe]([m5C])[sp].[moe](T)[sp].[lna](T)[sp].[lna](G)[sp].[lna](T)[s |
| | p].[moe](A)[sp].[moe]([m5C])[sp].[lna](T)[sp].[moe](T)[sp].[moe]([m5C] |
| | )[sp].[moe](A)[sp].[moe](T)[sp].[moe]([m5C])[sp].[moe]([m5C])[sp].[mo |
| | e]([m5C])}$$$$V2.0 |
| 747 | RNA1{[lna]([m5C])[sp].[lna](T)[sp].[moe](T)[sp].[moe](G)[sp].[moe](T)[ |
| | sp].[moe](A)[sp].[lna]([m5C])[sp].[lna](T)[sp].[moe](T)[sp].[moe]([m5C] |
| | )[sp].[moe](A)[sp].[moe](T)[sp].[moe]([m5C])[sp].[moe]([m5C])[sp].[mo |
| | e]([m5C])}$$$$V2.0 |
| 748 | RNA1{[moe]([m5C])[sp].[lna](T)[sp].[lna](T)[sp].[lna](G)[sp].[moe](T)[s |
| | p].[moe](A)[sp].[lna]([m5C])[sp].[moe](T)[sp].[moe](T)[sp].[moe]([m5C] |
| | )[sp].[moe](A)[sp].[moe](T)[sp].[moe]([m5C])[sp].[moe]([m5C])[sp].[mo |
| | e]([m5C])}$$$$V2.0 |
| 749 | RNA1{[lna]([m5C])[sp].[moe](T)[sp].[lna](T)[sp].[moe](G)[sp].[moe](T)[ |
| | sp].[lna](A)[sp].[moe]([m5C])[sp].[lna](T)[sp].[moe](T)[sp].[moe]([m5C] |
| | )[sp].[moe](A)[sp].[moe](T)[sp].[moe]([m5C])[sp].[moe]([m5C])[sp].[mo |
| | e]([m5C])}$$$$V2.0 |
| 750 | RNA1{[lna]([m5C])[sp].[moe](T)[sp].[lna](T)[sp].[lna](G)[sp].[lna](T)[sp |
| | ].[moe](A)[sp].[lna]([m5C])[sp].[moe](T)[sp].[moe](T)[sp].[moe]([m5C])[ |
| | sp].[moe](A)[sp].[moe](T)[sp].[moe]([m5C])[sp].[moe]([m5C])[sp].[moe] |
| | ([m5C])}$$$$V2.0 |
| 751 | RNA1{[lna]([m5C])[sp].[lna](T)[sp].[lna](T)[sp].[lna](G)[sp].[lna](T)[sp]. |
| | [moe](A)[sp].[moe]([m5C])[sp].[moe](T)[sp].[moe](T)[sp].[moe]([m5C])[ |
| | sp].[moe](A)[sp].[moe](T)[sp].[moe]([m5C])[sp].[moe]([m5C])[sp].[moe] |
| | ([m5C])}$$$$V2.0 |
| 752 | RNA1{[lna]([m5C])[sp].[moe](T)[sp].[lna](T)[sp].[lna](G)[sp].[moe](T)[s |
| | p].[lna](A)[sp].[moe]([m5C])[sp].[lna](T)[sp].[moe](T)[sp].[moe]([m5C])[ |
| | sp].[moe](A)[sp].[moe](T)[sp].[moe]([m5C])[sp].[moe]([m5C])[sp].[moe] |
| | ([m5C])}$$$$V2.0 |
| 753 | RNA1{[lna]([m5C])[sp].[lna](T)[sp].[lna](T)[sp].[moe](G)[sp].[lna](T)[sp |
| | ].[moe](A)[sp].[lna]([m5C])[sp].[moe](T)[sp].[moe](T)[sp].[moe]([m5C])[ |
| | sp].[moe](A)[sp].[moe](T)[sp].[moe]([m5C])[sp].[moe]([m5C])[sp].[moe] |
| | ([m5C])}$$$$V2.0 |
| 754 | RNA1{[lna]([m5C])[sp].[lna](T)[sp].[lna](T)[sp].[moe](G)[sp].[lna](T)[sp |
| | ].[moe](A)[sp].[moe]([m5C])[sp].[lna](T)[sp].[moe](T)[sp].[moe]([m5C])[ |
| | sp].[moe](A)[sp].[moe](T)[sp].[moe]([m5C])[sp].[moe]([m5C])[sp].[moe] |
| | ([m5C])}$$$$V2.0 |
| 755 | RNA1{[lna]([m5C])[sp].[lna](T)[sp].[lna](T)[sp].[lna](G)[sp].[lna](T)[sp]. |
| | [moe](A)[sp].[moe]([m5C])[sp].[lna](T)[sp].[moe](T)[sp].[moe]([m5C])[s |
| | p].[moe](A)[sp].[moe](T)[sp].[moe]([m5C])[sp].[moe]([m5C])[sp].[moe]( |
| | [m5C])}$$$$V2.0 |
| 756 | RNA1{[lna]([m5C])[sp].[moe](T)[sp].[moe](T)[sp].[lna](G)[sp].[lna](T)[s |
| | p].[lna](A)[sp].[lna]([m5C])[sp].[lna](T)[sp].[moe](T)[sp].[moe]([m5C])[s |
| | p].[moe](A)[sp].[moe](T)[sp].[moe]([m5C])[sp].[moe]([m5C])[sp].[moe]( |
| | [m5C])}$$$$V2.0 |
| 757 | RNA1{[lna]([m5C])[sp].[moe](T)[sp].[lna](T)[sp].[lna](G)[sp].[lna](T)[sp |
| | ].[lna](A)[sp].[lna]([m5C])[sp].[moe](T)[sp].[moe](T)[sp].[moe]([m5C])[s |
| | p].[moe](A)[sp].[moe](T)[sp].[moe]([m5C])[sp].[moe]([m5C])[sp].[moe]( |
| | [m5C])}$$$$V2.0 |
| 758 | RNA1{[moe]([m5C])[sp].[lna](T)[sp].[lna](T)[sp].[lna](G)[sp].[lna](T)[sp |
| | ].[lna](A)[sp].[lna]([m5C])[sp].[lna](T)[sp].[moe](T)[sp].[moe]([m5C])[sp |
| | ].[moe](A)[sp].[moe](T)[sp].[moe]([m5C])[sp].[moe]([m5C])[sp].[moe]([ |
| | m5C])}$$$$V2.0 |
| 759 | RNA1{[lna](G)[sp].[moe](T)[sp].[moe](T)[sp].[moe]([m5C])[sp].[moe](T |
| | )[sp].[moe](T)[sp].[moe](G)[sp].[moe](T)[sp].[moe](A)[sp].[moe]([m5C]) |
| | [sp].[moe](T)[sp].[moe](T)[sp].[moe]([m5C])[sp].[moe](A)[sp].[lna](T)}$ |
| | $$$V2.0 |
| 760 | RNA1{[lna](G)[sp].[lna](T)[sp].[moe](T)[sp].[moe]([m5C])[sp].[moe](T)[ |
| | sp].[moe](T)[sp].[moe](G)[sp].[moe](T)[sp].[moe](A)[sp].[moe]([m5C])[s |
| | p].[moe](T)[sp].[moe](T)[sp].[moe]([m5C])[sp].[lna](A)[sp].[lna](T)}$$$ |
| | $V2.0 |
| 761 | RNA1{[lna](G)[sp].[lna](T)[sp].[moe](T)[sp].[moe]([m5C])[sp].[moe](T)[ |
| | sp].[moe](T)[sp].[moe](G)[sp].[moe](T)[sp].[moe](A)[sp].[moe]([m5C])[s |
| | p].[moe](T)[sp].[moe](T)[sp].[moe]([m5C])[sp].[moe](A)[sp].[lna](T)}$$ |
| | $$V2.0 |
| 762 | RNA1{[lna](G)[sp].[moe](T)[sp].[moe](T)[sp].[moe]([m5C])[sp].[moe](T |
| | )[sp].[moe](T)[sp].[moe](G)[sp].[moe](T)[sp].[moe](A)[sp].[moe]([m5C]) |
| | [sp].[moe](T)[sp].[moe](T)[sp].[moe]([m5C])[sp].[lna](A)[sp].[lna](T)}$$ |
| | $$V2.0 |
| 763 | RNA1{[lna](G)[sp].[lna](T)[sp].[lna](T)[sp].[moe]([m5C])[sp].[moe](T)[s |
| | p].[moe](T)[sp].[moe](G)[sp].[moe](T)[sp].[moe](A)[sp].[moe]([m5C])[sp |
| | ].[moe](T)[sp].[moe](T)[sp].[moe]([m5C])[sp].[moe](A)[sp].[lna](T)}$$$ |
| | $V2.0 |
| 764 | RNA1{[lna](G)[sp].[moe](T)[sp].[moe](T)[sp].[moe]([m5C])[sp].[moe](T |
| | )[sp].[moe](T)[sp].[moe](G)[sp].[moe](T)[sp].[moe](A)[sp].[moe]([m5C]) |
| | [sp].[moe](T)[sp].[moe](T)[sp].[lna]([m5C])[sp].[lna](A)[sp].[lna](T)}$$$ |
| | $V2.0 |
| 765 | RNA1{[lna](G)[sp].[lna](T)[sp].[moe](T)[sp].[moe]([m5C])[sp].[moe](T)[ |
| | sp].[moe](T)[sp].[moe](G)[sp].[moe](T)[sp].[moe](A)[sp].[moe]([m5C])[s |
| | p].[moe](T)[sp].[moe](T)[sp].[lna]([m5C])[sp].[lna](A)[sp].[lna](T)}$$$$ |
| | V2.0 |
| 766 | RNA1{[lna](G)[sp].[lna](T)[sp].[lna](T)[sp].[moe]([m5C])[sp].[moe](T)[s |
| | p].[moe](T)[sp].[moe](G)[sp].[moe](T)[sp].[moe](A)[sp].[moe]([m5C])[sp |
| | ].[moe](T)[sp].[moe](T)[sp].[moe]([m5C])[sp].[lna](A)[sp].[lna](T)}$$$$ |
| | V2.0 |
| 767 | RNA1{[lna](G)[sp].[moe](T)[sp].[moe](T)[sp].[moe]([m5C])[sp].[moe](T |
| | )[sp].[moe](T)[sp].[moe](G)[sp].[lna](T)[sp].[lna](A)[sp].[moe]([m5C])[s |
| | p].[moe](T)[sp].[moe](T)[sp].[moe]([m5C])[sp].[moe](A)[sp].[lna](T)}$$ |
| | $$V2.0 |
| 768 | RNA1{[moe](G)[sp].[lna](T)[sp].[moe](T)[sp].[lna]([m5C])[sp].[moe](T)[ |
| | sp].[moe](T)[sp].[moe](G)[sp].[moe](T)[sp].[lna](A)[sp].[moe]([m5C])[sp |
| | ].[moe](T)[sp].[moe](T)[sp].[moe]([m5C])[sp].[moe](A)[sp].[lna](T)}$$$ |
| | $V2.0 |
| 769 | RNA1{[moe](G)[sp].[lna](T)[sp].[moe](T)[sp].[moe]([m5C])[sp].[lna](T)[ |
| | sp].[lna](T)[sp].[moe](G)[sp].[moe](T)[sp].[moe](A)[sp].[moe]([m5C])[sp |
| | ].[lna](T)[sp].[moe](T)[sp].[moe]([m5C])[sp].[moe](A)[sp].[moe](T)}$$$ |
| | $V2.0 |
| 770 | RNA1{[moe](G)[sp].[lna](T)[sp].[moe](T)[sp].[moe]([m5C])[sp].[moe](T |
| | )[sp].[lna](T)[sp].[moe](G)[sp].[moe](T)[sp].[moe](A)[sp].[moe]([m5C])[ |
| | sp].[moe](T)[sp].[moe](T)[sp].[moe]([m5C])[sp].[lna](A)[sp].[lna](T)}$$$ |
| | $V2.0 |
| 771 | RNA1{[moe](G)[sp].[moe](T)[sp].[moe](T)[sp].[moe]([m5C])[sp].[moe]( |
| | T)[sp].[moe](T)[sp].[moe](G)[sp].[moe](T)[sp].[lna](A)[sp].[moe]([m5C]) |
| | [sp].[lna](T)[sp].[lna](T)[sp].[moe]([m5C])[sp].[moe](A)[sp].[lna](T)}$$$ |
| | $V2.0 |
| 772 | RNA1{[moe](G)[sp].[moe](T)[sp].[lna](T)[sp].[lna]([m5C])[sp].[lna](T)[s |
| | p].[moe](T)[sp].[moe](G)[sp].[moe](T)[sp].[moe](A)[sp].[moe]([m5C])[sp |
| | ].[moe](T)[sp].[moe](T)[sp].[lna]([m5C])[sp].[moe](A)[sp].[lna](T)}$$$$ |
| | V2.0 |
| 773 | RNA1{[moe](G)[sp].[lna](T)[sp].[lna](T)[sp].[moe]([m5C])[sp].[moe](T)[ |
| | sp].[moe](T)[sp].[moe](G)[sp].[lna](T)[sp].[moe](A)[sp].[moe]([m5C])[sp |
| | ].[lna](T)[sp].[lna](T)[sp].[moe]([m5C])[sp].[moe](A)[sp].[moe](T)}$$$$ |
| | V2.0 |
| 774 | RNA1{[lna](G)[sp].[moe](T)[sp].[moe](T)[sp].[moe]([m5C])[sp].[moe](T |
| | )[sp].[moe](T)[sp].[lna](G)[sp].[moe](T)[sp].[lna](A)[sp].[lna]([m5C])[sp] |
| | .[moe](T)[sp].[moe](T)[sp].[moe]([m5C])[sp].[lna](A)[sp].[moe](T)}$$$$ |
| | V2.0 |
| 775 | RNA1{[lna](G)[sp].[moe](T)[sp].[moe](T)[sp].[lna]([m5C])[sp].[lna](T)[s |
| | p].[moe](T)[sp].[lna](G)[sp].[moe](T)[sp].[moe](A)[sp].[moe]([m5C])[sp] |
| | .[lna](T)[sp].[moe](T)[sp].[moe]([m5C])[sp].[moe](A)[sp].[moe](T)}$$$$ |
| | V2.0 |
| 776 | RNA1{[lna](G)[sp].[moe](T)[sp].[moe](T)[sp].[moe]([m5C])[sp].[moe](T |
| | )[sp].[lna](T)[sp].[moe](G)[sp].[moe](T)[sp].[lna](A)[sp].[moe]([m5C])[s |
| | p].[moe](T)[sp].[lna](T)[sp].[lna]([m5C])[sp].[moe](A)[sp].[lna](T)}$$$$ |
| | V2.0 |
| 777 | RNA1{[moe](G)[sp].[lna](T)[sp].[lna](T)[sp].[moe]([m5C])[sp].[moe](T)[ |
| | sp].[moe](T)[sp].[lna](G)[sp].[lna](T)[sp].[lna](A)[sp].[lna]([m5C])[sp].[ |
| | moe](T)[sp].[moe](T)[sp].[moe]([m5C])[sp].[moe](A)[sp].[moe](T)}$$$$ |
| | V2.0 |
| 778 | RNA1{[moe](G)[sp].[moe](T)[sp].[lna](T)[sp].[moe]([m5C])[sp].[moe](T |
| | )[sp].[moe](T)[sp].[moe](G)[sp].[lna](T)[sp].[lna](A)[sp].[lna]([m5C])[sp] |
| | .[moe](T)[sp].[moe](T)[sp].[lna]([m5C])[sp].[moe](A)[sp].[lna](T)}$$$$V |
| | 2.0 |
| 779 | RNA1{[moe](G)[sp].[moe](T)[sp].[moe](T)[sp].[lna]([m5C])[sp].[lna](T)[ |
| | sp].[moe](T)[sp].[moe](G)[sp].[lna](T)[sp].[moe](A)[sp].[moe]([m5C])[sp |
| | ].[lna](T)[sp].[lna](T)[sp].[moe]([m5C])[sp].[lna](A)[sp].[moe](T)}$$$$V |
| | 2.0 |
| 780 | RNA1{[moe](T)[sp].[moe]([m5C])[sp].[moe](A)[sp].[moe](T)[sp].[moe]( |
| | [m5C])[sp].[moe]([m5C])[sp].[moe]([m5C])[sp].[moe](A)[sp].[moe]([m5 |
| | C])[sp].[moe](T)[sp].[moe](G)[sp].[moe](A)[sp].[moe](T)[sp].[moe](T)}$ |
| | $$$V2.0 |
| 781 | RNA1{[moe](T)[sp].[moe]([m5C])[sp].[moe](A)[sp].[moe](T)[sp].[moe]( |
| | [m5C])[sp].[moe]([m5C])[sp].[moe]([m5C])[sp].[moe](A)[sp].[moe]([m5 |
| | C])[sp].[moe](T)[sp].[moe](G)[sp].[moe](A)[sp].[moe](T)[sp].[moe](T)[s |
| | p].[moe]([m5C])[sp].[moe](T)}$$$$V2.0 |
| 782 | RNA1{[moe](T)[sp].[moe]([m5C])[sp].[moe](A)[sp].[moe](T)[sp].[moe]( |
| | [m5C])[sp].[moe]([m5C])[sp].[moe]([m5C])[sp].[moe](A)[sp].[moe]([m5 |
| | C])[sp].[moe](T)[sp].[moe](G)[sp].[moe](A)[sp].[moe](T)[sp].[moe](T)[s |
| | p].[moe]([m5C])[sp].[moe](T)[sp].[moe](G)[sp].[moe](A)[sp].[moe](A)[s |
| | p].[moe](T)}$$$$V2.0 |
| 783 | RNA1{[moe](T)[sp].[moe]([m5C])[sp].[moe](A)[sp].[moe](T)[sp].[moe]( |
| | [m5C])[sp].[moe]([m5C])[sp].[moe]([m5C])[sp].[moe](A)[sp].[moe]([m5 |
| | C])[sp].[moe](T)[sp].[moe](G)[sp].[moe](A)[sp].[moe](T)[sp].[moe](T)[s |
| | p].[moe]([m5C])[sp].[moe](T)[sp].[moe](G)[sp].[moe](A)[sp].[moe](A)[s |
| | p].[moe](T)[sp].[moe](T)[sp].[moe]([m5C])}$$$$V2.0 |
| 784 | RNA1{[moe]([m5C])[sp].[moe]([m5C])[sp].[moe]([m5C])[sp].[moe](A)[s |
| | p].[moe]([m5C])[sp].[moe](T)[sp].[moe](G)[sp].[moe](A)[sp].[moe](T)[sp |
| | ].[moe](T)[sp].[moe]([m5C])[sp].[moe](T)[sp].[moe](G)[sp].[moe](A)}$$ |
| | $$V2.0 |
| 785 | RNA1{[moe](A)[sp].[moe](T)[sp].[moe]([m5C])[sp].[moe]([m5C])[sp].[ |
| | moe]([m5C])[sp].[moe](A)[sp].[moe]([m5C])[sp].[moe](T)[sp].[moe](G)[ |
| | sp].[moe](A)[sp].[moe](T)[sp].[moe](T)[sp].[moe]([m5C])[sp].[moe](T)[s |
| | p].[moe](G)[sp].[moe](A)}$$$$V2.0 |
| 786 | RNA1{[moe]([m5C])[sp].[moe](T)[sp].[moe](T)[sp].[moe]([m5C])[sp].[m |
| | oc](A)[sp].[moe](T)[sp].[moe]([m5C])[sp].[moe]([m5C])[sp].[moe]([m5C |
| | ])[sp].[moe](A)[sp].[moe]([m5C])[sp].[moe](T)[sp].[moe](G)[sp].[moe](A |
| | )[sp].[moe](T)[sp].[moe](T)[sp].[moe]([m5C])[sp].[moe](T)[sp].[moe](G) |
| | [sp].[moe](A)}$$$$V2.0 |
| 787 | RNA1{[moe](T)[sp].[moe](A)[sp].[moe]([m5C])[sp].[moe](T)[sp].[moe]( |
| | T)[sp].[moe]([m5C])[sp].[moe](A)[sp].[moe](T)[sp].[moe]([m5C])[sp].[m |
| | oe]([m5C])[sp].[moe]([m5C])[sp].[moe](A)[sp].[moe]([m5C])[sp].[moe]( |
| | T)[sp].[moe](G)[sp].[moe](A)[sp].[moe](T)[sp].[moe](T)[sp].[moe]([m5C |
| | ])[sp].[moe](T)[sp].[moe](G)[sp].[moe](A)}$$$$V2.0 |
| 788 | RNA1{[moe](A)[sp].[moe](T)[sp].[moe]([m5C])[sp].[moe]([m5C])[sp].[ |
| | moe]([m5C])[sp].[moe](A)[sp].[moe]([m5C])[sp].[moe](T)[sp].[moe](G)[ |
| | sp].[moe](A)[sp].[moe](T)[sp].[moe](T)[sp].[moe]([m5C])[sp].[moe](T)}$ |
| | $$$V2.0 |
| 789 | RNA1{[moe]([m5C])[sp].[moe](A)[sp].[moe](T)[sp].[moe]([m5C])[sp].[ |
| | moe]([m5C])[sp].[moe]([m5C])[sp].[moe](A)[sp].[moe]([m5C])[sp].[moe] |
| | (T)[sp].[moe](G)[sp].[moe](A)[sp].[moe](T)[sp].[moe](T)[sp].[moe]([m5 |
| | C])[sp].[moe](T)[sp].[moe](G)}$$$$V2.0 |
| 790 | RNA1{[moe](T)[sp].[moe](T)[sp].[moe]([m5C])[sp].[moe](A)[sp].[moe]( |
| | T)[sp].[moe]([m5C])[sp].[moe]([m5C])[sp].[moe]([m5C])[sp].[moe](A)[s |
| | p].[moe]([m5C])[sp].[moe](T)[sp].[moe](G)[sp].[moe](A)[sp].[moe](T)[sp |
| | ].[moe](T)[sp].[moe]([m5C])[sp].[moe](T)[sp].[moe](G)[sp].[moe](A)[sp] |
| | .[moe](A)}$$$$V2.0 |
| 791 | RNA1{[moe]([m5C])[sp].[moe](T)[sp].[moe](T)[sp].[moe]([m5C])[sp].[m |
| | oe](A)[sp].[moe](T)[sp].[moe]([m5C])[sp].[moe]([m5C])[sp].[moe]([m5C |
| | ])[sp].[moe](A)[sp].[moe]([m5C])[sp].[moe](T)[sp].[moe](G)[sp].[moe](A |
| | )[sp].[moe](T)[sp].[moe](T)[sp].[moe]([m5C])[sp].[moe](T)[sp].[moe](G) |
| | [sp].[moe](A)[sp].[moe](A)[sp].[moe](T)}$$$$V2.0 |
| 792 | RNA1{[lna](T)[sp].[lna]([m5C])[sp].[moe](A)[sp].[moe](T)[sp].[moe]([m |
| | 5C])[sp].[moe]([m5C])[sp].[moe]([m5C])[sp].[moe](A)[sp].[moe]([m5C]) |
| | [sp].[moe](T)[sp].[moe](G)[sp].[moe](A)[sp].[lna](T)[sp].[lna](T)}$$$$V |
| | 2.0 |
| 793 | RNA1{[lna](T)[sp].[lna]([m5C])[sp].[moe](A)[sp].[moe](T)[sp].[moe]([m |
| | 5C])[sp].[moe]([m5C])[sp].[moe]([m5C])[sp].[moe](A)[sp].[moe]([m5C]) |
| | [sp].[moe](T)[sp].[moe](G)[sp].[moe](A)[sp].[moe](T)[sp].[moe](T)[sp].[l |
| | na]([m5C])[sp].[lna](T)}$$$$V2.0 |
| 794 | RNA1{[lna](T)[sp].[lna]([m5C])[sp].[moe](A)[sp].[moe](T)[sp].[moe]([m |
| | 5C])[sp].[moe]([m5C])[sp].[moe]([m5C])[sp].[moe](A)[sp].[moe]([m5C]) |
| | [sp].[moe](T)[sp].[moe](G)[sp].[moe](A)[sp].[moe](T)[sp].[moe](T)[sp].[ |
| | moe]([m5C])[sp].[moe](T)[sp].[moe](G)[sp].[moe](A)[sp].[lna](A)[sp].[ln |
| | a](T)}$$$$V2.0 |
| 795 | RNA1{[lna](T)[sp].[lna]([m5C])[sp].[moe](A)[sp].[moe](T)[sp].[moe]([m |
| | 5C])[sp].[moe]([m5C])[sp].[moe]([m5C])[sp].[moe](A)[sp].[moe]([m5C]) |
| | [sp].[moe](T)[sp].[moe](G)[sp].[moe](A)[sp].[moe](T)[sp].[moe](T)[sp].[ |
| | moe]([m5C])[sp].[moe](T)[sp].[moe](G)[sp].[moe](A)[sp].[moe](A)[sp].[ |
| | moe](T)[sp].[lna](T)[sp].[lna]([m5C])}$$$$V2.0 |
| 796 | RNA1{[lna]([m5C])[sp].[lna]([m5C])[sp].[moe]([m5C])[sp].[moe](A)[sp]. |
| | [moe]([m5C])[sp].[moe](T)[sp].[moe](G)[sp].[moe](A)[sp].[moe](T)[sp].[ |
| | moe](T)[sp].[moe]([m5C])[sp].[moe](T)[sp].[lna](G)[sp].[lna](A)}$$$$V |
| | 2.0 |
| 797 | RNA1{[lna](A)[sp].[lna](T)[sp].[moe]([m5C])[sp].[moe]([m5C])[sp].[mo |
| | e]([m5C])[sp].[moe](A)[sp].[moe]([m5C])[sp].[moe](T)[sp].[moe](G)[sp]. |
| | [moe](A)[sp].[moe](T)[sp].[moe](T)[sp].[moe]([m5C])[sp].[moe](T)[sp].[l |
| | na](G)[sp].[lna](A)}$$$$V2.0 |
| 798 | RNA1{[lna]([m5C])[sp].[lna](T)[sp].[moe](T)[sp].[moe]([m5C])[sp].[moe |
| | ](A)[sp].[moe](T)[sp].[moe]([m5C])[sp].[moe]([m5C])[sp].[moe]([m5C])[ |
| | sp].[moe](A)[sp].[moe]([m5C])[sp].[moe](T)[sp].[moe](G)[sp].[moe](A)[s |
| | p].[moe](T)[sp].[moe](T)[sp].[moe]([m5C])[sp].[moe](T)[sp].[lna](G)[sp]. |
| | [lna](A)}$$$$V2.0 |
| 799 | RNA1{[lna](T)[sp].[lna](A)[sp].[moe]([m5C])[sp].[moe](T)[sp].[moe](T)[ |
| | sp].[moe]([m5C])[sp].[moe](A)[sp].[moe](T)[sp].[moe]([m5C])[sp].[moe] |
| | ([m5C])[sp].[moe]([m5C])[sp].[moe](A)[sp].[moe]([m5C])[sp].[moe](T)[s |
| | p].[moe](G)[sp].[moe](A)[sp].[moe](T)[sp].[moe](T)[sp].[moe]([m5C])[sp |
| | ].[moe](T)[sp].[lna](G)[sp].[lna](A)}$$$$V2.0 |
| 800 | RNA1{[lna](A)[sp].[lna](T)[sp].[moe]([m5C])[sp].[moe]([m5C])[sp].[mo |
| | e]([m5C])[sp].[moe](A)[sp].[moe]([m5C])[sp].[moe](T)[sp].[moe](G)[sp]. |
| | [moe](A)[sp].[moe](T)[sp].[moe](T)[sp].[lna]([m5C])[sp].[lna](T)}$$$$V |
| | 2.0 |
| 801 | RNA1{[lna]([m5C])[sp].[lna](A)[sp].[moe](T)[sp].[moe]([m5C])[sp].[mo |
| | e]([m5C])[sp].[moe]([m5C])[sp].[moe](A)[sp].[moe]([m5C])[sp].[moe](T) |
| | [sp].[moe](G)[sp].[moe](A)[sp].[moe](T)[sp].[moe](T)[sp].[moe]([m5C])[ |
| | sp].[lna](T)[sp].[lna](G)}$$$$V2.0 |
| 802 | RNA1{[lna](T)[sp].[lna](T)[sp].[moe]([m5C])[sp].[moe](A)[sp].[moe](T)[ |
| | sp].[moe]([m5C])[sp].[moe]([m5C])[sp].[moe]([m5C])[sp].[moe](A)[sp].[ |
| | moe]([m5C])[sp].[moe](T)[sp].[moe](G)[sp].[moe](A)[sp].[moe](T)[sp].[ |
| | moe](T)[sp].[moe]([m5C])[sp].[moe](T)[sp].[moe](G)[sp].[lna](A)[sp].[ln |
| | a](A)}$$$$V2.0 |
| 803 | RNA1{[lna]([m5C])[sp].[lna](T)[sp].[moe](T)[sp].[moe]([m5C])[sp].[moe |
| | ](A)[sp].[moe](T)[sp].[moe]([m5C])[sp].[moe]([m5C])[sp].[moe]([m5C])[ |
| | sp].[moe](A)[sp].[moe]([m5C])[sp].[moe](T)[sp].[moe](G)[sp].[moe](A)[s |
| | p].[moe](T)[sp].[moe](T)[sp].[moe]([m5C])[sp].[moe](T)[sp].[moe](G)[sp |
| | ].[moe](A)[sp].[lna](A)[sp].[lna](T)}$$$$V2.0 |
| 804 | RNA1{[moe](T)[sp].[moe]([m5C])[sp].[moe](T)[sp].[moe](T)[sp].[moe]( |
| | T)[sp].[moe]([m5C])[sp].[moe](A)[sp].[moe](A)[sp].[moe]([m5C])[sp].[m |
| | oe](T)[sp].[moe](A)[sp].[moe](G)[sp].[moe](A)[sp].[moe](A)[sp].[moe](T |
| | )[sp].[moe](A)[sp].[moe](A)[sp].[moe](A)}$$$$V2.0 |
| 805 | RNA1{[moe](T)[sp].[moe](T)[sp].[moe]([m5C])[sp].[moe](T)[sp].[moe]( |
| | T)[sp].[moe](T)[sp].[moe]([m5C])[sp].[moe](A)[sp].[moe](A)[sp].[moe]([ |
| | m5C])[sp].[moe](T)[sp].[moe](A)[sp].[moe](G)[sp].[moe](A)[sp].[moe](A |
| | )[sp].[moe](T)[sp].[moe](A)[sp].[moe](A)}$$$$V2.0 |
| 806 | RNA1{[moe](A)[sp].[moe](T)[sp].[moe](T)[sp].[moe]([m5C])[sp].[moe]( |
| | T)[sp].[moe](T)[sp].[moe](T)[sp].[moe]([m5C])[sp].[moe](A)[sp].[moe]( |
| | A)[sp].[moe]([m5C])[sp].[moe](T)[sp].[moe](A)[sp].[moe](G)[sp].[moe]( |
| | A)[sp].[moe](A)[sp].[moe](T)[sp].[moe](A)}$$$$V2.0 |
| 807 | RNA1{[moe](A)[sp].[moe](A)[sp].[moe](T)[sp].[moe](T)[sp].[moe]([m5 |
| | C])[sp].[moe](T)[sp].[moe](T)[sp].[moe](T)[sp].[moe]([m5C])[sp].[moe]( |
| | A)[sp].[moe](A)[sp].[moe]([m5C])[sp].[moe](T)[sp].[moe](A)[sp].[moe]( |
| | G)[sp].[moe](A)[sp].[moe](A)[sp].[moe](T)}$$$$V2.0 |
| 808 | RNA1{[moe](T)[sp].[moe](G)[sp].[moe](A)[sp].[moe](A)[sp].[moe](T)[s |
| | p].[moe](T)[sp].[moe]([m5C])[sp].[moe](T)[sp].[moe](T)[sp].[moe](T)[sp |
| | ].[moe]([m5C])[sp].[moe](A)[sp].[moe](A)[sp].[moe]([m5C])[sp].[moe](T |
| | )[sp].[moe](A)[sp].[moe](G)[sp].[moe](A)}$$$$V2.0 |
| 809 | RNA1{[moe]([m5C])[sp].[moe](T)[sp].[moe](G)[sp].[moe](A)[sp].[moe]( |
| | A)[sp].[moe](T)[sp].[moe](T)[sp].[moe]([m5C])[sp].[moe](T)[sp].[moe](T |
| | )[sp].[moe](T)[sp].[moe]([m5C])[sp].[moe](A)[sp].[moe](A)[sp].[moe]([m |
| | 5C])[sp].[moe](T)[sp].[moe](A)[sp].[moe](G)}$$$$V2.0 |
| 810 | RNA1{[moe](T)[sp].[moe]([m5C])[sp].[moe](T)[sp].[moe](G)[sp].[moe]( |
| | A)[sp].[moe](A)[sp].[moe](T)[sp].[moe](T)[sp].[moe]([m5C])[sp].[moe]( |
| | T)[sp].[moe](T)[sp].[moe](T)[sp].[moe]([m5C])[sp].[moe](A)[sp].[moe]( |
| | A)[sp].[moe]([m5C])[sp].[moe](T)[sp].[moe](A)}$$$$V2.0 |
| 811 | RNA1{[moe](T)[sp].[moe](T)[sp].[moe]([m5C])[sp].[moe](T)[sp].[moe]( |
| | G)[sp].[moe](A)[sp].[moe](A)[sp].[moe](T)[sp].[moe](T)[sp].[moe]([m5C |
| | ])[sp].[moe](T)[sp].[moe](T)[sp].[moe](T)[sp].[moe]([m5C])[sp].[moe](A |
| | )[sp].[moe](A)[sp].[moe]([m5C])[sp].[moe](T)}$$$$V2.0 |
| 812 | RNA1{[moe](G)[sp].[moe](A)[sp].[moe](T)[sp].[moe](T)[sp].[moe]([m5 |
| | C])[sp].[moe](T)[sp].[moe](G)[sp].[moe](A)[sp].[moe](A)[sp].[moe](T)[s |
| | p].[moe](T)[sp].[moe]([m5C])[sp].[moe](T)[sp].[moe](T)[sp].[moe](T)[sp |
| | ].[moe]([m5C])[sp].[moe](A)[sp].[moe](A)}$$$$V2.0 |
| 813 | RNA1{[moe](T)[sp].[moe](G)[sp].[moe](A)[sp].[moe](T)[sp].[moe](T)[sp |
| | ].[moe]([m5C])[sp].[moe](T)[sp].[moe](G)[sp].[moe](A)[sp].[moe](A)[sp] |
| | .[moe](T)[sp].[moe](T)[sp].[moe]([m5C])[sp].[moe](T)[sp].[moe](T)[sp].[ |
| | moe](T)[sp].[moe]([m5C])[sp].[moe](A)}$$$$V2.0 |
| 814 | RNA1{[moe]([m5C])[sp].[moe](T)[sp].[moe](G)[sp].[moe](A)[sp].[moe]( |
| | T)[sp].[moe](T)[sp].[moe]([m5C])[sp].[moe](T)[sp].[moe](G)[sp].[moe]( |
| | A)[sp].[moe](A)[sp].[moe](T)[sp].[moe](T)[sp].[moe]([m5C])[sp].[moe]( |
| | T)[sp].[moe](T)[sp].[moe](T)[sp].[moe]([m5C])}$$$$V2.0 |
| 815 | RNA1{[moe](A)[sp].[moe]([m5C])[sp].[moe](T)[sp].[moe](G)[sp].[moe]( |
| | A)[sp].[moe](T)[sp].[moe](T)[sp].[moe]([m5C])[sp].[moe](T)[sp].[moe]( |
| | G)[sp].[moe](A)[sp].[moe](A)[sp].[moe](T)[sp].[moe](T)[sp].[moe]([m5C |
| | ])[sp].[moe](T)[sp].[moe](T)[sp].[moe](T)}$$$$V2.0 |
| 816 | RNA1{[moe]([m5C])[sp].[moe]([m5C])[sp].[moe](A)[sp].[moe]([m5C])[s |
| | p].[moe](T)[sp].[moe](G)[sp].[moe](A)[sp].[moe](T)[sp].[moe](T)[sp].[m |
| | oe]([m5C])[sp].[moe](T)[sp].[moe](G)[sp].[moe](A)[sp].[moe](A)[sp].[m |
| | oe](T)[sp].[moe](T)[sp].[moe]([m5C])[sp].[moe](T)}$$$$V2.0 |
| 817 | RNA1{[moe]([m5C])[sp].[moe]([m5C])[sp].[moe]([m5C])[sp].[moe](A)[s |
| | p].[moe]([m5C])[sp].[moe](T)[sp].[moe](G)[sp].[moe](A)[sp].[moe](T)[sp |
| | ].[moe](T)[sp].[moe]([m5C])[sp].[moe](T)[sp].[moe](G)[sp].[moe](A)[sp] |
| | .[moe](A)[sp].[moe](T)[sp].[moe](T)[sp].[moe]([m5C])}$$$$V2.0 |
| 818 | RNA1{[moe](T)[sp].[moe]([m5C])[sp].[moe]([m5C])[sp].[moe]([m5C])[s |
| | p].[moe](A)[sp].[moe]([m5C])[sp].[moe](T)[sp].[moe](G)[sp].[moe](A)[s |
| | p].[moe](T)[sp].[moe](T)[sp].[moe]([m5C])[sp].[moe](T)[sp].[moe](G)[sp |
| | ].[moe](A)[sp].[moe](A)[sp].[moe](T)[sp].[moe](T)}$$$$V2.0 |
| 819 | RNA1{[moe](A)[sp].[moe](T)[sp].[moe]([m5C])[sp].[moe]([m5C])[sp].[ |
| | moe]([m5C])[sp].[moe](A)[sp].[moe]([m5C])[sp].[moe](T)[sp].[moe](G)[ |
| | sp].[moe](A)[sp].[moe](T)[sp].[moe](T)[sp].[moe]([m5C])[sp].[moe](T)[s |
| | p].[moe](G)[sp].[moe](A)[sp].[moe](A)[sp].[moe](T)}$$$$V2.0 |
| 820 | RNA1{[moe](T)[sp].[moe]([m5C])[sp].[moe](A)[sp].[moe](T)[sp].[moe]( |
| | [m5C])[sp].[moe]([m5C])[sp].[moe]([m5C])[sp].[moe](A)[sp].[moe]([m5 |
| | C])[sp].[moe](T)[sp].[moe](G)[sp].[moe](A)[sp].[moe](T)[sp].[moe](T)[s |
| | p].[moe]([m5C])[sp].[moe](T)[sp].[moe](G)[sp].[moe](A)}$$$$V2.0 |
| 821 | RNA1{[moe](T)[sp].[moe](T)[sp].[moe]([m5C])[sp].[moe](A)[sp].[moe]( |
| | T)[sp].[moe]([m5C])[sp].[moe]([m5C])[sp].[moe]([m5C])[sp].[moe](A)[s |
| | p].[moe]([m5C])[sp].[moe](T)[sp].[moe](G)[sp].[moe](A)[sp].[moe](T)[sp |
| | ].[moe](T)[sp].[moe]([m5C])[sp].[moe](T)[sp].[moe](G)}$$$$V2.0 |
| 822 | RNA1{[moe]([m5C])[sp].[moe](T)[sp].[moe](T)[sp].[moe]([m5C])[sp].[m |
| | oe](A)[sp].[moe](T)[sp].[moe]([m5C])[sp].[moe]([m5C])[sp].[moe]([m5C |
| | ])[sp].[moe](A)[sp].[moe]([m5C])[sp].[moe](T)[sp].[moe](G)[sp].[moe](A |
| | )[sp].[moe](T)[sp].[moe](T)[sp].[moe]([m5C])[sp].[moe](T)}$$$$V2.0 |
| 823 | RNA1{[moe](A)[sp].[moe]([m5C])[sp].[moe](T)[sp].[moe](T)[sp].[moe]( |
| | [m5C])[sp].[moe](A)[sp].[moe](T)[sp].[moe]([m5C])[sp].[moe]([m5C])[s |
| | p].[moe]([m5C])[sp].[moe](A)[sp].[moe]([m5C])[sp].[moe](T)[sp].[moe]( |
| | G)[sp].[moe](A)[sp].[moe](T)[sp].[moe](T)[sp].[moe]([m5C])}$$$$V2.0 |
| 824 | RNA1{[moe](G)[sp].[moe](T)[sp].[moe](A)[sp].[moe]([m5C])[sp].[moe]( |
| | T)[sp].[moe](T)[sp].[moe]([m5C])[sp].[moe](A)[sp].[moe](T)[sp].[moe]([ |
| | m5C])[sp].[moe]([m5C])[sp].[moe]([m5C])[sp].[moe](A)[sp].[moe]([m5C |
| | ])[sp].[moe](T)[sp].[moe](G)[sp].[moe](A)[sp].[moe](T)}$$$$V2.0 |
| 825 | RNA1{[moe](T)[sp].[moe](G)[sp].[moe](T)[sp].[moe](A)[sp].[moe]([m5 |
| | C])[sp].[moe](T)[sp].[moe](T)[sp].[moe]([m5C])[sp].[moe](A)[sp].[moe]( |
| | T)[sp].[moe]([m5C])[sp].[moe]([m5C])[sp].[moe]([m5C])[sp].[moe](A)[s |
| | p].[moe]([m5C])[sp].[moe](T)[sp].[moe](G)[sp].[moe](A)}$$$$V2.0 |
| 826 | RNA1{[moe](T)[sp].[moe](T)[sp].[moe](G)[sp].[moe](T)[sp].[moe](A)[sp |
| | ].[moe]([m5C])[sp].[moe](T)[sp].[moe](T)[sp].[moe]([m5C])[sp].[moe](A |
| | )[sp].[moe](T)[sp].[moe]([m5C])[sp].[moe]([m5C])[sp].[moe]([m5C])[sp]. |
| | [moe](A)[sp].[moe]([m5C])[sp].[moe](T)[sp].[moe](G)}$$$$V2.0 |
| 827 | RNA1{[moe]([m5C])[sp].[moe](T)[sp].[moe](T)[sp].[moe](G)[sp].[moe]( |
| | T)[sp].[moe](A)[sp].[moe]([m5C])[sp].[moe](T)[sp].[moe](T)[sp].[moe]([ |
| | m5C])[sp].[moe](A)[sp].[moe](T)[sp].[moe]([m5C])[sp].[moe]([m5C])[sp |
| | ].[moe]([m5C])[sp].[moe](A)[sp].[moe]([m5C])[sp].[moe](T)}$$$$V2.0 |
| 828 | RNA1{[moe](T)[sp].[moe](T)[sp].[moe]([m5C])[sp].[moe](T)[sp].[moe]( |
| | T)[sp].[moe](G)[sp].[moe](T)[sp].[moe](A)[sp].[moe]([m5C])[sp].[moe]( |
| | T)[sp].[moe](T)[sp].[moe]([m5C])[sp].[moe](A)[sp].[moe](T)[sp].[moe]([ |
| | m5C])[sp].[moe]([m5C])[sp].[moe]([m5C])[sp].[moe](A)}$$$$V2.0 |
| 829 | RNA1{[moe](G)[sp].[moe](T)[sp].[moe](T)[sp].[moe]([m5C])[sp].[moe]( |
| | T)[sp].[moe](T)[sp].[moe](G)[sp].[moe](T)[sp].[moe](A)[sp].[moe]([m5C |
| | ])[sp].[moe](T)[sp].[moe](T)[sp].[moe]([m5C])[sp].[moe](A)[sp].[moe](T |
| | )[sp].[moe]([m5C])[sp].[moe]([m5C])[sp].[moe]([m5C])}$$$$V2.0 |
| 830 | RNA1{[moe](T)[sp].[moe](G)[sp].[moe](T)[sp].[moe](T)[sp].[moe]([m5C |
| | ])[sp].[moe](T)[sp].[moe](T)[sp].[moe](G)[sp].[moe](T)[sp].[moe](A)[sp]. |
| | [moe]([m5C])[sp].[moe](T)[sp].[moe](T)[sp].[moe]([m5C])[sp].[moe](A)[ |
| | sp].[moe](T)[sp].[moe]([m5C])[sp].[moe]([m5C])}$$$$V2.0 |
| 831 | RNA1{[moe](G)[sp].[moe](T)[sp].[moe](G)[sp].[moe](T)[sp].[moe](T)[sp |
| | ].[moe]([m5C])[sp].[moe](T)[sp].[moe](T)[sp].[moe](G)[sp].[moe](T)[sp]. |
| | [moe](A)[sp].[moe]([m5C])[sp].[moe](T)[sp].[moe](T)[sp].[moe]([m5C])[ |
| | sp].[moe](A)[sp].[moe](T)[sp].[moe]([m5C])}$$$$V2.0 |
| 832 | RNA1{[moe](A)[sp].[moe](G)[sp].[moe](G)[sp].[moe](T)[sp].[moe](G)[s |
| | p].[moe](T)[sp].[moe](T)[sp].[moe]([m5C])[sp].[moe](T)[sp].[moe](T)[sp |
| | ].[moe](G)[sp].[moe](T)[sp].[moe](A)[sp].[moe]([m5C])[sp].[moe](T)[sp] |
| | .[moe](T)[sp].[moe]([m5C])[sp].[moe](A)}$$$$V2.0 |
| 833 | RNA1{[moe](A)[sp].[moe](A)[sp].[moe](G)[sp].[moe](G)[sp].[moe](T)[s |
| | p].[moe](G)[sp].[moe](T)[sp].[moe](T)[sp].[moe]([m5C])[sp].[moe](T)[sp |
| | ].[moe](T)[sp].[moe](G)[sp].[moe](T)[sp].[moe](A)[sp].[moe]([m5C])[sp] |
| | .[moe](T)[sp].[moe](T)[sp].[moe]([m5C])}$$$$V2.0 |
| 834 | RNA1{[moe](G)[sp].[moe](A)[sp].[moe](A)[sp].[moe](G)[sp].[moe](G)[s |
| | p].[moe](T)[sp].[moe](G)[sp].[moe](T)[sp].[moe](T)[sp].[moe]([m5C])[sp |
| | ].[moe](T)[sp].[moe](T)[sp].[moe](G)[sp].[moe](T)[sp].[moe](A)[sp].[mo |
| | e]([m5C])[sp].[moe](T)[sp].[moe](T)}$$$$V2.0 |
| 835 | RNA1{[moe](T)[sp].[moe](G)[sp].[moe](A)[sp].[moe](A)[sp].[moe](G)[s |
| | p].[moe](G)[sp].[moe](T)[sp].[moe](G)[sp].[moe](T)[sp].[moe](T)[sp].[m |
| | oe]([m5C])[sp].[moe](T)[sp].[moe](T)[sp].[moe](G)[sp].[moe](T)[sp].[mo |
| | e](A)[sp].[moe]([m5C])[sp].[moe](T)}$$$$V2.0 |
| 836 | RNA1{[moe](T)[sp].[moe]([m5C])[sp].[moe](T)[sp].[moe](G)[sp].[moe]( |
| | A)[sp].[moe](A)[sp].[moe](G)[sp].[moe](G)[sp].[moe](T)[sp].[moe](G)[sp |
| | ].[moe](T)[sp].[moe](T)[sp].[moe]([m5C])[sp].[moe](T)[sp].[moe](T)[sp]. |
| | [moe](G)[sp].[moe](T)[sp].[moe](A)}$$$$V2.0 |
| 837 | RNA1{[lna](T)[sp].[lna](C)[sp].m(A)[sp].m(U)[sp].m(C)[sp].m(C)[sp].m( |
| | C)[sp].m(A)[sp].m(C)[sp].m(U)[sp].m(G)[sp].m(A)[sp].m(U)[sp].m(U)[sp |
| | ].m(C)[sp].m(U)[sp].[lna](G)[sp].[lna](A)}$$$$V2.0 |
| 838 | RNA1{m(U)[sp].m(U)[sp].m(C)[sp].m(U)[sp].m(U)[sp].m(G)[sp].m(U)[s |
| | p].m(A)[sp].m(C)[sp].m(U)[sp].m(U)[sp].m(C)[sp].m(A)[sp].m(U)[sp].m( |
| | C)[sp].m(C)[sp].m(C)[sp].m(A)}$$$$V2.0 |
| 839 | RNA1{m(G)[sp].m(U)[sp].m(U)[sp].m(C)[sp].m(U)[sp].m(U)[sp].m(G)[s |
| | p].m(U)[sp].m(A)[sp].m(C)[sp].m(U)[sp].m(U)[sp].m(C)[sp].m(A)[sp].m( |
| | U)[sp].m(C)[sp].m(C)[sp].m(C)}$$$$V2.0 |
| 840 | RNA1{m(U)[sp].m(G)[sp].m(U)[sp].m(U)[sp].m(C)[sp].m(U)[sp].m(U)[s |
| | p].m(G)[sp].m(U)[sp].m(A)[sp].m(C)[sp].m(U)[sp].m(U)[sp].m(C)[sp].m( |
| | A)[sp].m(U)[sp].m(C)[sp].m(C)}$$$$V2.0 |
| 841 | RNA1{[lna](T)[sp].[lna](G)[sp].m(U)[sp].m(U)[sp].m(C)[sp].m(U)[sp].m( |
| | U)[sp].m(G)[sp].m(U)[sp].m(A)[sp].m(C)[sp].m(U)[sp].m(U)[sp].m(C)[sp |
| | ].m(A)[sp].m(U)[sp].[lna](C)[sp].[lna](C)}$$$$V2.0 |
| 842 | RNA1{m(G)[sp].m(U)[sp].m(G)[sp].m(U)[sp].m(U)[sp].m(C)[sp].m(U)[s |
| | p].m(U)[sp].m(G)[sp].m(U)[sp].m(A)[sp].m(C)[sp].m(U)[sp].m(U)[sp].m( |
| | C)[sp].m(A)[sp].m(U)[sp].m(C)}$$$$V2.0 |
| 843 | RNA1{[lna](G)[sp].[lna](T)[sp].m(G)[sp].m(U)[sp].m(U)[sp].m(C)[sp].m( |
| | U)[sp].m(U)[sp].m(G)[sp].m(U)[sp].m(A)[sp].m(C)[sp].m(U)[sp].m(U)[sp |
| | ].m(C)[sp].m(A)[sp].[lna](T)[sp].[lna](C)}$$$$V2.0 |
| 844 | RNA1{m(G)[sp].m(G)[sp].m(U)[sp].m(G)[sp].m(U)[sp].m(U)[sp].m(C)[s |
| | p].m(U)[sp].m(U)[sp].m(G)[sp].m(U)[sp].m(A)[sp].m(C)[sp].m(U)[sp].m( |
| | U)[sp].m(C)[sp].m(A)[sp].m(U)}$$$$V2.0 |
| 845 | RNA1{m(A)[sp].m(G)[sp].m(G)[sp].m(U)[sp].m(G)[sp].m(U)[sp].m(U)[s |
| | p].m(C)[sp].m(U)[sp].m(U)[sp].m(G)[sp].m(U)[sp].m(A)[sp].m(C)[sp].m( |
| | U)[sp].m(U)[sp].m(C)[sp].m(A)}$$$$V2.0 |
| 846 | RNA1{m(A)[sp].m(G)[sp].m(C)[sp].m(C)[sp].m(A)[sp].m(U)[sp].m(U)[s |
| | p].m(G)[sp].m(U)[sp].m(G)[sp].m(U)[sp].m(U)[sp].m(G)[sp].m(A)[sp].m( |
| | A)[sp].m(U)[sp].m(C)[sp].m(C)}$$$$V2.0 |
| 847 | RNA1{[lna](T)[sp].[lna](G)[sp].m(T)[sp].m(T)[sp].m([m5C])[sp].m(T)[sp |
| | ].m(T)[sp].m(G)[sp].m(T)[sp].m(A)[sp].m([m5C])[sp].m(T)[sp].m(T)[sp]. |
| | m([m5C])[sp].m(A)[sp].m(T)[sp].[lna]([m5C])[sp].[lna]([m5C])}$$$$V2. |
| | 0 |
| 848 | RNA1{[lna](G)[sp].[lna](T)[sp].m(G)[sp].m(T)[sp].m(T)[sp].m([m5C])[sp |
| | ].m(T)[sp].m(T)[sp].m(G)[sp].m(T)[sp].m(A)[sp].m([m5C])[sp].m(T)[sp]. |
| | m(T)[sp].m([m5C])[sp].m(A)[sp].[lna](T)[sp].[lna]([m5C])}$$$$V2.0 |
| 849 | RNA1{[moe](T)[sp].[moe](G)[sp].[moe](T)[sp].[fl2r](U)[sp].[fl2r](C)[sp] |
| | .[fl2r](U)[sp].[fl2r](U)[sp].[fl2r](G)[sp].[fl2r](U)[sp].[fl2r](A)[sp].[fl2r](C |
| | )[sp].[fl2r](U)[sp].[fl2r](U)[sp].[fl2r](C)[sp].[fl2r](A)[sp].[moe](T)[sp].[m |
| | oe]([m5C])[sp].[moe]([m5C])}$$$$V2.0 |
| 850 | RNA1{[moe](T)[sp].[moe](G)[sp].[moe](T)[sp].[moe](T)[sp].[moe]([m5C |
| | ])[sp].[moe](T)[sp].[moe](T)[sp].[moe](G)[sp].[moe](T)[sp].[moe](A)[sp]. |
| | [moe]([m5C])[sp].[moe](T)[sp].[moe](T)[sp].[moe]([m5C])[sp].[lna](A)} |
| | $$$$V2.0 |
| 851 | RNA1{[moe](G)[sp].[moe](T)[sp].[moe](G)[sp].[moe](T)[sp].[moe](T)[sp |
| | ].[moe]([m5C])[sp].[moe](T)[sp].[moe](T)[sp].[moe](G)[sp].[moe](T)[sp]. |
| | [moe](A)[sp].[moe]([m5C])[sp].[moe](T)[sp].[lna](T)[sp].[lna]([m5C])}$ |
| | $$$V2.0 |
| 852 | RNA1{[lna](G)[sp].[moe](T)[sp].[moe](T)[sp].[moe]([m5C])[sp].[moe](T |
| | )[sp].[moe](T)[sp].[moe](G)[sp].[moe](T)[sp].[moe](A)[sp].[moe]([m5C]) |
| | [sp].[moe](T)[sp].[moe](T)[sp].[moe]([m5C])[sp].[moe](A)[sp].[moe](T)[ |
| | sp].[lna]([m5C])}$$$$V2.0 |
| 853 | RNA1{[lna](G)[sp].[moe](T)[sp].[moe](G)[sp].[moe](T)[sp].[moe](T)[sp] |
| | .[moe]([m5C])[sp].[moe](T)[sp].[moe](T)[sp].[moe](G)[sp].[moe](T)[sp].[ |
| | moe](A)[sp].[moe]([m5C])[sp].[moe](T)[sp].[moe](T)[sp].[moe]([m5C])[s |
| | p].[lna](A)}$$$$V2.0 |
| 854 | RNA1{[moe](T)[sp].[moe](G)[sp].[fl2r](T)[sp].[fl2r](T)[sp].[fl2r]([m5C]) |
| | [sp].[fl2r](T)[sp].[fl2r](T)[sp].[fl2r](G)[sp].[moe](T)[sp].[moe](A)[sp].[fl2 |
| | r]([m5C])[sp].[fl2r](T)[sp].[fl2r](T)[sp].[fl2r]([m5C])[sp].[fl2r](A)[sp].[fl2 |
| | r](T)[sp].[moe]([m5C])[sp].[moe]([m5C])}$$$$V2.0 |
| 855 | RNA1{[lna](T)[sp].[moe](G)[sp].[moe](T)[sp].[fl2r](T)[sp].[fl2r]([m5C])[ |
| | sp].[fl2r](T)[sp].[fl2r](T)[sp].[moe](G)[sp].[moe](T)[sp].[moe](A)[sp].[mo |
| | e]([m5C])[sp].[fl2r](T)[sp].[fl2r](T)[sp].[fl2r]([m5C])[sp].[fl2r](A)[sp].[m |
| | oe](T)[sp].[moe]([m5C])[sp].[lna]([m5C])}$$$$V2.0 |
| 856 | RNA1{[lna](T)[sp].[fl2r](G)[sp].[fl2r](T)[sp].[fl2r](T)[sp].[fl2r]([m5C])[s |
| | p].[fl2r](T)[sp].[fl2r](T)[sp].[fl2r](G)[sp].[fl2r](T)[sp].[fl2r](A)[sp].[fl2r]([ |
| | m5C])[sp].[fl2r](T)[sp].[fl2r](T)[sp].[fl2r]([m5C])[sp].[fl2r](A)[sp].[fl2r]( |
| | T)[sp].[fl2r]([m5C])[sp].[lna]([m5C])}$$$$V2.0 |
| 857 | RNA1{[lna](T)[sp].[lna](G)[sp].[moe](T)[sp].[fl2r](T)[sp].[fl2r]([m5C])[s |
| | p].[fl2r](T)[sp].[fl2r](T)[sp].[fl2r](G)[sp].[fl2r](T)[sp].[fl2r](A)[sp].[fl2r]([ |
| | m5C])[sp].[fl2r](T)[sp].[fl2r](T)[sp].[fl2r]([m5C])[sp].[fl2r](A)[sp].[moe]( |
| | T)[sp].[lna]([m5C])[sp].[lna]([m5C])}$$$$V2.0 |
| 858 | RNA1{[lna](A)[sp].[lna](A)[sp].[moe](T)[sp].[moe](T)[sp].[moe]([m5C]) |
| | [sp].[moe](T)[sp].[moe](T)[sp].[moe](T)[sp].[moe]([m5C])[sp].[moe](A)[ |
| | sp].[moe](A)[sp].[moe]([m5C])[sp].[moe](T)[sp].[moe](A)[sp].[moe](G)} |
| | $$$$V2.0 |
| 859 | RNA1{[lna](T)[sp].[moe]([m5C])[sp].[moe](T)[sp].[moe](G)[sp].[moe](A |
| | )[sp].[moe](A)[sp].[moe](T)[sp].[moe](T)[sp].[moe]([m5C])[sp].[moe](T) |
| | [sp].[moe](T)[sp].[moe](T)[sp].[moe]([m5C])[sp].[moe](A)[sp].[moe](A)[ |
| | sp].[lna]([m5C])}$$$$V2.0 |
| 860 | RNA1{[lna](T)[sp].[moe](G)[sp].[moe](T)[sp].[fl2r](T)[sp].[fl2r]([m5C])[ |
| | sp].[fl2r](T)[sp].[fl2r](T)[sp].[fl2r](G)[sp].[fl2r](T)[sp].[fl2r](A)[sp].[fl2r]( |
| | [m5C])[sp].[fl2r](T)[sp].[fl2r](T)[sp].[fl2r]([m5C])[sp].[fl2r](A)[sp].[moe] |
| | (T)[sp].[moe]([m5C])[sp].[lna]([m5C])}$$$$V2.0 |
| 861 | RNA1{[lna]([m5C])[sp].[moe](T)[sp].[moe](T)[sp].[moe](G)[sp].[moe](T |
| | )[sp].[moe](A)[sp].[moe]([m5C])[sp].[moe](T)[sp].[moe](T)[sp].[moe]([m |
| | 5C])[sp].[moe](A)[sp].[moe](T)[sp].[moe]([m5C])[sp].[moe]([m5C])[sp].[ |
| | moe]([m5C])}$$$$V2.0 |
| 862 | RNA1{[lna]([m5C])[sp].[lna](T)[sp].[moe](T)[sp].[moe](G)[sp].[moe](T)[ |
| | sp].[moe](A)[sp].[moe]([m5C])[sp].[moe](T)[sp].[moe](T)[sp].[moe]([m5 |
| | C])[sp].[moe](A)[sp].[moe](T)[sp].[moe]([m5C])[sp].[moe]([m5C])[sp].[ |
| | moe]([m5C])}$$$$V2.0 |
| 863 | RNA1{[lna]([m5C])[sp].[lna](T)[sp].[lna](T)[sp].[moe](G)[sp].[moe](T)[s |
| | p].[moe](A)[sp].[moe]([m5C])[sp].[moe](T)[sp].[moe](T)[sp].[moe]([m5C |
| | ])[sp].[moe](A)[sp].[moe](T)[sp].[moe]([m5C])[sp].[moe]([m5C])[sp].[mo |
| | e]([m5C])}$$$$V2.0 |
| 864 | RNA1{[lna]([m5C])[sp].[lna](T)[sp].[lna](T)[sp].[moe](G)[sp].[moe](T)[s |
| | p].[moe](A)[sp].[moe]([m5C])[sp].[moe](T)[sp].[moe](T)[sp].[moe]([m5C |
| | ])[sp].[moe](A)[sp].[moe](T)[sp].[moe]([m5C])[sp].[moe]([m5C])[sp].[lna |
| | ]([m5C])}$$$$V2.0 |
| 865 | RNA1{[lna]([m5C])[sp].[lna](T)[sp].[lna](T)[sp].[moe](G)[sp].[moe](T)[s |
| | p].[moe](A)[sp].[moe]([m5C])[sp].[moe](T)[sp].[moe](T)[sp].[moe]([m5C |
| | ])[sp].[moe](A)[sp].[moe](T)[sp].[moe]([m5C])[sp].[lna]([m5C])[sp].[lna] |
| | ([m5C])}$$$$V2.0 |
| 866 | RNA1{[lna]([m5C])[sp].[moe](T)[sp].[moe](T)[sp].[moe](G)[sp].[moe](T |
| | )[sp].[moe](A)[sp].[moe]([m5C])[sp].[moe](T)[sp].[moe](T)[sp].[moe]([m |
| | 5C])[sp].[moe](A)[sp].[moe](T)[sp].[lna]([m5C])[sp].[lna]([m5C])[sp].[ln |
| | a]([m5C])}$$$$V2.0 |
| 867 | RNA1{[lna]([m5C])[sp].[lna](T)[sp].[moe](T)[sp].[moe](G)[sp].[moe](T)[ |
| | sp].[moe](A)[sp].[moe]([m5C])[sp].[moe](T)[sp].[moe](T)[sp].[moe]([m5 |
| | C])[sp].[moe](A)[sp].[moe](T)[sp].[lna]([m5C])[sp].[lna]([m5C])[sp].[lna] |
| | ([m5C])}$$$$V2.0 |
| 868 | RNA1{[moe]([m5C])[sp].[moe](T)[sp].[moe](T)[sp].[moe](G)[sp].[moe]( |
| | T)[sp].[moe](A)[sp].[moe]([m5C])[sp].[moe](T)[sp].[moe](T)[sp].[moe]([ |
| | m5C])[sp].[moe](A)[sp].[moe](T)[sp].[moe]([m5C])[sp].[moe]([m5C])[sp |
| | ].[lna]([m5C])}$$$$V2.0 |
| 869 | RNA1{[moe]([m5C])[sp].[moe](T)[sp].[moe](T)[sp].[moe](G)[sp].[moe]( |
| | T)[sp].[moe](A)[sp].[moe]([m5C])[sp].[moe](T)[sp].[moe](T)[sp].[moe]([ |
| | m5C])[sp].[moe](A)[sp].[moe](T)[sp].[moe]([m5C])[sp].[lna]([m5C])[sp]. |
| | [lna]([m5C])}$$$$V2.0 |
| 870 | RNA1{[moe]([m5C])[sp].[moe](T)[sp].[moe](T)[sp].[moe](G)[sp].[moe]( |
| | T)[sp].[moe](A)[sp].[moe]([m5C])[sp].[moe](T)[sp].[moe](T)[sp].[moe]([ |
| | m5C])[sp].[moe](A)[sp].[moe](T)[sp].[lna]([m5C])[sp].[lna]([m5C])[sp].[l |
| | na]([m5C])}$$$$V2.0 |
| 871 | RNA1{[lna](T)[sp].[moe]([m5C])[sp].[moe](T)[sp].[moe](T)[sp].[moe](G |
| | )[sp].[moe](T)[sp].[moe](A)[sp].[moe]([m5C])[sp].[moe](T)[sp].[moe](T) |
| | [sp].[moe]([m5C])[sp].[moe](A)[sp].[moe](T)[sp].[moe]([m5C])[sp].[moe |
| | ]([m5C])}$$$$V2.0 |
| 872 | RNA1{[lna](T)[sp].[lna]([m5C])[sp].[moe](T)[sp].[moe](T)[sp].[moe](G)[ |
| | sp].[moe](T)[sp].[moe](A)[sp].[moe]([m5C])[sp].[moe](T)[sp].[moe](T)[s |
| | p].[moe]([m5C])[sp].[moe](A)[sp].[moe](T)[sp].[moe]([m5C])[sp].[moe]( |
| | [m5C])}$$$$V2.0 |
| 873 | RNA1{[lna](T)[sp].[lna]([m5C])[sp].[lna](T)[sp].[moe](T)[sp].[moe](G)[s |
| | p].[moe](T)[sp].[moe](A)[sp].[moe]([m5C])[sp].[moe](T)[sp].[moe](T)[sp |
| | ].[moe]([m5C])[sp].[moe](A)[sp].[moe](T)[sp].[moe]([m5C])[sp].[moe]([ |
| | m5C])}$$$$V2.0 |
| 874 | RNA1{[lna](T)[sp].[moe]([m5C])[sp].[moe](T)[sp].[moe](T)[sp].[moe](G |
| | )[sp].[moe](T)[sp].[moe](A)[sp].[moe]([m5C])[sp].[moe](T)[sp].[moe](T) |
| | [sp].[moe]([m5C])[sp].[moe](A)[sp].[moe](T)[sp].[moe]([m5C])[sp].[lna]( |
| | [m5C])}$$$$V2.0 |
| 875 | RNA1{[lna](T)[sp].[lna]([m5C])[sp].[moe](T)[sp].[moe](T)[sp].[moe](G)[ |
| | sp].[moe](T)[sp].[moe](A)[sp].[moe]([m5C])[sp].[moe](T)[sp].[moe](T)[s |
| | p].[moe]([m5C])[sp].[moe](A)[sp].[moe](T)[sp].[moe]([m5C])[sp].[lna]([ |
| | m5C])}$$$$V2.0 |
| 876 | RNA1{[lna](T)[sp].[lna]([m5C])[sp].[lna](T)[sp].[moe](T)[sp].[moe](G)[s |
| | p].[moe](T)[sp].[moe](A)[sp].[moe]([m5C])[sp].[moe](T)[sp].[moe](T)[sp |
| | ].[moe]([m5C])[sp].[moe](A)[sp].[moe](T)[sp].[moe]([m5C])[sp].[lna]([m |
| | 5C])}$$$$V2.0 |
| 877 | RNA1{[lna](T)[sp].[moe]([m5C])[sp].[moe](T)[sp].[moe](T)[sp].[moe](G |
| | )[sp].[moe](T)[sp].[moe](A)[sp].[moe]([m5C])[sp].[moe](T)[sp].[moe](T) |
| | [sp].[moe]([m5C])[sp].[moe](A)[sp].[moe](T)[sp].[lna]([m5C])[sp].[lna]([ |
| | m5C])}$$$$V2.0 |
| 878 | RNA1{[lna](T)[sp].[lna]([m5C])[sp].[moe](T)[sp].[moe](T)[sp].[moe](G)[ |
| | sp].[moe](T)[sp].[moe](A)[sp].[moe]([m5C])[sp].[moe](T)[sp].[moe](T)[s |
| | p].[moe]([m5C])[sp].[moe](A)[sp].[moe](T)[sp].[lna]([m5C])[sp].[lna]([m |
| | 5C])}$$$$V2.0 |
| 879 | RNA1{[lna](T)[sp].[lna]([m5C])[sp].[lna](T)[sp].[moe](T)[sp].[moe](G)[s |
| | p].[moe](T)[sp].[moe](A)[sp].[moe]([m5C])[sp].[moe](T)[sp].[moe](T)[sp |
| | ].[moe]([m5C])[sp].[moe](A)[sp].[moe](T)[sp].[lna]([m5C])[sp].[lna]([m5 |
| | C])}$$$$V2.0 |
| 880 | RNA1{[lna](T)[sp].[moe]([m5C])[sp].[moe](T)[sp].[moe](T)[sp].[moe](G |
| | )[sp].[moe](T)[sp].[moe](A)[sp].[moe]([m5C])[sp].[moe](T)[sp].[moe](T) |
| | [sp].[moe]([m5C])[sp].[moe](A)[sp].[lna](T)[sp].[lna]([m5C])[sp].[lna]([ |
| | m5C])}$$$$V2.0 |
| 881 | RNA1{[lna](T)[sp].[lna]([m5C])[sp].[moe](T)[sp].[moe](T)[sp].[moe](G)[ |
| | sp].[moe](T)[sp].[moe](A)[sp].[moe]([m5C])[sp].[moe](T)[sp].[moe](T)[s |
| | p].[moe]([m5C])[sp].[moe](A)[sp].[lna](T)[sp].[lna]([m5C])[sp].[lna]([m5 |
| | C])}$$$$V2.0 |
| 882 | RNA1{[moe](T)[sp].[moe]([m5C])[sp].[moe](T)[sp].[moe](T)[sp].[moe]( |
| | G)[sp].[moe](T)[sp].[moe](A)[sp].[moe]([m5C])[sp].[moe](T)[sp].[moe]( |
| | T)[sp].[moe]([m5C])[sp].[moe](A)[sp].[moe](T)[sp].[moe]([m5C])[sp].[ln |
| | a]([m5C])}$$$$V2.0 |
| 883 | RNA1{[moe](T)[sp].[moe]([m5C])[sp].[moe](T)[sp].[moe](T)[sp].[moe]( |
| | G)[sp].[moe](T)[sp].[moe](A)[sp].[moe]([m5C])[sp].[moe](T)[sp].[moe]( |
| | T)[sp].[moe]([m5C])[sp].[moe](A)[sp].[moe](T)[sp].[lna]([m5C])[sp].[lna |
| | ]([m5C])}$$$$V2.0 |
| 884 | RNA1{[moe](T)[sp].[moe]([m5C])[sp].[moe](T)[sp].[moe](T)[sp].[moe]( |
| | G)[sp].[moe](T)[sp].[moe](A)[sp].[moe]([m5C])[sp].[moe](T)[sp].[moe]( |
| | T)[sp].[moe]([m5C])[sp].[moe](A)[sp].[lna](T)[sp].[lna]([m5C])[sp].[lna]( |
| | [m5C])}$$$$V2.0 |
| 885 | RNA1{[lna](T)[sp].[moe](T)[sp].[moe]([m5C])[sp].[moe](T)[sp].[moe](T |
| | )[sp].[moe](G)[sp].[moe](T)[sp].[moe](A)[sp].[moe]([m5C])[sp].[moe](T) |
| | [sp].[moe](T)[sp].[moe]([m5C])[sp].[moe](A)[sp].[moe](T)[sp].[moe]([m |
| | 5C])}$$$$V2.0 |
| 886 | RNA1{[lna](T)[sp].[lna](T)[sp].[moe]([m5C])[sp].[moe](T)[sp].[moe](T)[ |
| | sp].[moe](G)[sp].[moe](T)[sp].[moe](A)[sp].[moe]([m5C])[sp].[moe](T)[s |
| | p].[moe](T)[sp].[moe]([m5C])[sp].[moe](A)[sp].[moe](T)[sp].[moe]([m5C |
| | ])}$$$$V2.0 |
| 887 | RNA1{[lna](T)[sp].[lna](T)[sp].[lna]([m5C])[sp].[moe](T)[sp].[moe](T)[s |
| | p].[moe](G)[sp].[moe](T)[sp].[moe](A)[sp].[moe]([m5C])[sp].[moe](T)[sp |
| | ].[moe](T)[sp].[moe]([m5C])[sp].[moe](A)[sp].[moe](T)[sp].[moe]([m5C] |
| | )}$$$$V2.0 |
| 888 | RNA1{[lna](T)[sp].[moe](T)[sp].[moe]([m5C])[sp].[moe](T)[sp].[moe](T |
| | )[sp].[moe](G)[sp].[moe](T)[sp].[moe](A)[sp].[moe]([m5C])[sp].[moe](T) |
| | [sp].[moe](T)[sp].[moe]([m5C])[sp].[moe](A)[sp].[moe](T)[sp].[lna]([m5 |
| | C])}$$$$V2.0 |
| 889 | RNA1{[lna](T)[sp].[lna](T)[sp].[moe]([m5C])[sp].[moe](T)[sp].[moe](T)[ |
| | sp].[moe](G)[sp].[moe](T)[sp].[moe](A)[sp].[moe]([m5C])[sp].[moe](T)[s |
| | p].[moe](T)[sp].[moe]([m5C])[sp].[moe](A)[sp].[moe](T)[sp].[lna]([m5C] |
| | )}$$$$V2.0 |
| 890 | RNA1{[lna](T)[sp].[lna](T)[sp].[lna]([m5C])[sp].[moe](T)[sp].[moe](T)[s |
| | p].[moe](G)[sp].[moe](T)[sp].[moe](A)[sp].[moe]([m5C])[sp].[moe](T)[sp |
| | ].[moe](T)[sp].[moe]([m5C])[sp].[moe](A)[sp].[moe](T)[sp].[lna]([m5C]) |
| | }$$$$V2.0 |
| 891 | RNA1{[lna](T)[sp].[moe](T)[sp].[moe]([m5C])[sp].[moe](T)[sp].[moe](T |
| | )[sp].[moe](G)[sp].[moe](T)[sp].[moe](A)[sp].[moe]([m5C])[sp].[moe](T) |
| | [sp].[moe](T)[sp].[moe]([m5C])[sp].[moe](A)[sp].[lna](T)[sp].[lna]([m5C |
| | ])}$$$$V2.0 |
| 892 | RNA1{[lna](T)[sp].[lna](T)[sp].[moe]([m5C])[sp].[moe](T)[sp].[moe](T)[ |
| | sp].[moe](G)[sp].[moe](T)[sp].[moe](A)[sp].[moe]([m5C])[sp].[moe](T)[s |
| | p].[moe](T)[sp].[moe]([m5C])[sp].[moe](A)[sp].[lna](T)[sp].[lna]([m5C]) |
| | }$$$$V2.0 |
| 893 | RNA1{[lna](T)[sp].[lna](T)[sp].[lna]([m5C])[sp].[moe](T)[sp].[moe](T)[s |
| | p].[moe](G)[sp].[moe](T)[sp].[moe](A)[sp].[moe]([m5C])[sp].[moe](T)[sp |
| | ].[moe](T)[sp].[moe]([m5C])[sp].[moe](A)[sp].[lna](T)[sp].[lna]([m5C])} |
| | $$$$V2.0 |
| 894 | RNA1{[lna](T)[sp].[moe](T)[sp].[moe]([m5C])[sp].[moe](T)[sp].[moe](T |
| | )[sp].[moe](G)[sp].[moe](T)[sp].[moe](A)[sp].[moe]([m5C])[sp].[moe](T) |
| | [sp].[moe](T)[sp].[moe]([m5C])[sp].[lna](A)[sp].[lna](T)[sp].[lna]([m5C]) |
| | }$$$$V2.0 |
| 895 | RNA1{[lna](T)[sp].[lna](T)[sp].[moe]([m5C])[sp].[moe](T)[sp].[moe](T)[ |
| | sp].[moe](G)[sp].[moe](T)[sp].[moe](A)[sp].[moe]([m5C])[sp].[moe](T)[s |
| | p].[moe](T)[sp].[moe]([m5C])[sp].[lna](A)[sp].[lna](T)[sp].[lna]([m5C])} |
| | $$$$V2.0 |
| 896 | RNA1{[moe](T)[sp].[moe](T)[sp].[moe]([m5C])[sp].[moe](T)[sp].[moe]( |
| | T)[sp].[moe](G)[sp].[moe](T)[sp].[moe](A)[sp].[moe]([m5C])[sp].[moe]( |
| | T)[sp].[moe](T)[sp].[moe]([m5C])[sp].[moe](A)[sp].[moe](T)[sp].[lna]([m |
| | 5C])}$$$$V2.0 |
| 897 | RNA1{[moe](T)[sp].[moe](T)[sp].[moe]([m5C])[sp].[moe](T)[sp].[moe]( |
| | T)[sp].[moe](G)[sp].[moe](T)[sp].[moe](A)[sp].[moe]([m5C])[sp].[moe]( |
| | T)[sp].[moe](T)[sp].[moe]([m5C])[sp].[moe](A)[sp].[lna](T)[sp].[lna]([m5 |
| | C])}$$$$V2.0 |
| 898 | RNA1{[moe](T)[sp].[moe](T)[sp].[moe]([m5C])[sp].[moe](T)[sp].[moe]( |
| | T)[sp].[moe](G)[sp].[moe](T)[sp].[moe](A)[sp].[moe]([m5C])[sp].[moe]( |
| | T)[sp].[moe](T)[sp].[moe]([m5C])[sp].[lna](A)[sp].[lna](T)[sp].[lna]([m5 |
| | C])}$$$$V2.0 |
| 899 | RNA1{[lna](G)[sp].[moe](T)[sp].[moe](T)[sp].[moe]([m5C])[sp].[moe](T |
| | )[sp].[moe](T)[sp].[moe](G)[sp].[moe](T)[sp].[moe](A)[sp].[moe]([m5C]) |
| | [sp].[moe](T)[sp].[moe](T)[sp].[moe]([m5C])[sp].[moe](A)[sp].[moe](T)} |
| | $$$$V2.0 |
| 900 | RNA1{[lna](G)[sp].[lna](T)[sp].[moe](T)[sp].[moe]([m5C])[sp].[moe](T)[ |
| | sp].[moe](T)[sp].[moe](G)[sp].[moe](T)[sp].[moe](A)[sp].[moe]([m5C])[s |
| | p].[moe](T)[sp].[moe](T)[sp].[moe]([m5C])[sp].[moe](A)[sp].[moe](T)}$ |
| | $$$V2.0 |
| 901 | RNA1{[lna](G)[sp].[lna](T)[sp].[lna](T)[sp].[moe]([m5C])[sp].[moe](T)[s |
| | p].[moe](T)[sp].[moe](G)[sp].[moe](T)[sp].[moe](A)[sp].[moe]([m5C])[sp |
| | ].[moe](T)[sp].[moe](T)[sp].[moe]([m5C])[sp].[moe](A)[sp].[moe](T)}$$ |
| | $$V2.0 |
| 902 | RNA1{[moe](G)[sp].[moe](T)[sp].[moe](T)[sp].[moe]([m5C])[sp].[moe]( |
| | T)[sp].[moe](T)[sp].[moe](G)[sp].[moe](T)[sp].[moe](A)[sp].[moe]([m5C |
| | ])[sp].[moe](T)[sp].[moe](T)[sp].[moe]([m5C])[sp].[moe](A)[sp].[lna](T)} |
| | $$$$V2.0 |
| 903 | RNA1{[moe](G)[sp].[moe](T)[sp].[moe](T)[sp].[moe]([m5C])[sp].[moe]( |
| | T)[sp].[moe](T)[sp].[moe](G)[sp].[moe](T)[sp].[moe](A)[sp].[moe]([m5C |
| | ])[sp].[moe](T)[sp].[moe](T)[sp].[moe]([m5C])[sp].[lna](A)[sp].[lna](T)}$ |
| | $$$V2.0 |
| 904 | RNA1{[moe](G)[sp].[moe](T)[sp].[moe](T)[sp].[moe]([m5C])[sp].[moe]( |
| | T)[sp].[moe](T)[sp].[moe](G)[sp].[moe](T)[sp].[moe](A)[sp].[moe]([m5C |
| | ])[sp].[moe](T)[sp].[moe](T)[sp].[lna]([m5C])[sp].[lna](A)[sp].[lna](T)}$$ |
| | $$V2.0 |
| 905 | RNA1{[lna]([m5C])[sp].[moe](T)[sp].[moe](T)[sp].[moe](G)[sp].[moe](T |
| | )[sp].[moe](A)[sp].[moe]([m5C])[sp].[moe](T)[sp].[moe](T)[sp].[moe]([m |
| | 5C])[sp].[moe](A)[sp].[moe](T)[sp].[moe]([m5C])[sp].[moe]([m5C])[sp].[ |
| | moe]([m5C])[sp].[moe](A)}$$$$V2.0 |
| 906 | RNA1{[lna]([m5C])[sp].[lna](T)[sp].[moe](T)[sp].[moe](G)[sp].[moe](T)[ |
| | sp].[moe](A)[sp].[moe]([m5C])[sp].[moe](T)[sp].[moe](T)[sp].[moe]([m5 |
| | C])[sp].[moe](A)[sp].[moe](T)[sp].[moe]([m5C])[sp].[moe]([m5C])[sp].[ |
| | moe]([m5C])[sp].[moe](A)}$$$$V2.0 |
| 907 | RNA1{[lna]([m5C])[sp].[lna](T)[sp].[lna](T)[sp].[moe](G)[sp].[moe](T)[s |
| | p].[moe](A)[sp].[moe]([m5C])[sp].[moe](T)[sp].[moe](T)[sp].[moe]([m5C |
| | ])[sp].[moe](A)[sp].[moe](T)[sp].[moe]([m5C])[sp].[moe]([m5C])[sp].[mo |
| | e]([m5C])[sp].[moe](A)}$$$$V2.0 |
| 908 | RNA1{[lna]([m5C])[sp].[moe](T)[sp].[moe](T)[sp].[moe](G)[sp].[moe](T |
| | )[sp].[moe](A)[sp].[moe]([m5C])[sp].[moe](T)[sp].[moe](T)[sp].[moe]([m |
| | 5C])[sp].[moe](A)[sp].[moe](T)[sp].[moe]([m5C])[sp].[moe]([m5C])[sp].[ |
| | moe]([m5C])[sp].[lna](A)}$$$$V2.0 |
| 909 | RNA1{[lna]([m5C])[sp].[lna](T)[sp].[moe](T)[sp].[moe](G)[sp].[moe](T)[ |
| | sp].[moe](A)[sp].[moe]([m5C])[sp].[moe](T)[sp].[moe](T)[sp].[moe]([m5 |
| | C])[sp].[moe](A)[sp].[moe](T)[sp].[moe]([m5C])[sp].[moe]([m5C])[sp].[ |
| | moe]([m5C])[sp].[lna](A)}$$$$V2.0 |
| 910 | RNA1{[lna]([m5C])[sp].[lna](T)[sp].[lna](T)[sp].[moe](G)[sp].[moe](T)[s |
| | p].[moe](A)[sp].[moe]([m5C])[sp].[moe](T)[sp].[moe](T)[sp].[moe]([m5C |
| | ])[sp].[moe](A)[sp].[moe](T)[sp].[moe]([m5C])[sp].[moe]([m5C])[sp].[mo |
| | e]([m5C])[sp].[lna](A)}$$$$V2.0 |
| 911 | RNA1{[lna]([m5C])[sp].[moe](T)[sp].[moe](T)[sp].[moe](G)[sp].[moe](T |
| | )[sp].[moe](A)[sp].[moe]([m5C])[sp].[moe](T)[sp].[moe](T)[sp].[moe]([m |
| | 5C])[sp].[moe](A)[sp].[moe](T)[sp].[moe]([m5C])[sp].[moe]([m5C])[sp].[ |
| | lna]([m5C])[sp].[lna](A)}$$$$V2.0 |
| 912 | RNA1{[lna]([m5C])[sp].[lna](T)[sp].[moe](T)[sp].[moe](G)[sp].[moe](T)[ |
| | sp].[moe](A)[sp].[moe]([m5C])[sp].[moe](T)[sp].[moe](T)[sp].[moe]([m5 |
| | C])[sp].[moe](A)[sp].[moe](T)[sp].[moe]([m5C])[sp].[moe]([m5C])[sp].[l |
| | na]([m5C])[sp].[lna](A)}$$$$V2.0 |
| 913 | RNA1{[lna]([m5C])[sp].[lna](T)[sp].[lna](T)[sp].[moe](G)[sp].[moe](T)[s |
| | p].[moe](A)[sp].[moe]([m5C])[sp].[moe](T)[sp].[moe](T)[sp].[moe]([m5C |
| | ])[sp].[moe](A)[sp].[moe](T)[sp].[moe]([m5C])[sp].[moe]([m5C])[sp].[lna |
| | ]([m5C])[sp].[lna](A)}$$$$V2.0 |
| 914 | RNA1{[lna]([m5C])[sp].[lna](T)[sp].[lna](T)[sp].[lna](G)[sp].[moe](T)[sp |
| | ].[moe](A)[sp].[moe]([m5C])[sp].[moe](T)[sp].[moe](T)[sp].[moe]([m5C] |
| | )[sp].[moe](A)[sp].[moe](T)[sp].[moe]([m5C])[sp].[moe]([m5C])[sp].[lna] |
| | ([m5C])[sp].[lna](A)}$$$$V2.0 |
| 915 | RNA1{[lna]([m5C])[sp].[moe](T)[sp].[moe](T)[sp].[moe](G)[sp].[moe](T |
| | )[sp].[moe](A)[sp].[moe]([m5C])[sp].[moe](T)[sp].[moe](T)[sp].[moe]([m |
| | 5C])[sp].[moe](A)[sp].[moe](T)[sp].[moe]([m5C])[sp].[lna]([m5C])[sp].[l |
| | na]([m5C])[sp].[lna](A)}$$$$V2.0 |
| 916 | RNA1{[lna]([m5C])[sp].[lna](T)[sp].[moe](T)[sp].[moe](G)[sp].[moe](T)[ |
| | sp].[moe](A)[sp].[moe]([m5C])[sp].[moe](T)[sp].[moe](T)[sp].[moe]([m5 |
| | C])[sp].[moe](A)[sp].[moe](T)[sp].[moe]([m5C])[sp].[lna]([m5C])[sp].[ln |
| | a]([m5C])[sp].[lna](A)}$$$$V2.0 |
| 917 | RNA1{[lna]([m5C])[sp].[lna](T)[sp].[lna](T)[sp].[lna](G)[sp].[moe](T)[sp |
| | ].[moe](A)[sp].[moe]([m5C])[sp].[moe](T)[sp].[moe](T)[sp].[moe]([m5C] |
| | )[sp].[moe](A)[sp].[moe](T)[sp].[moe]([m5C])[sp].[lna]([m5C])[sp].[lna]( |
| | [m5C])[sp].[lna](A)}$$$$V2.0 |
| 918 | RNA1{[lna]([m5C])[sp].[lna](T)[sp].[moe](T)[sp].[moe](G)[sp].[moe](T)[ |
| | sp].[moe](A)[sp].[moe]([m5C])[sp].[moe](T)[sp].[moe](T)[sp].[moe]([m5 |
| | C])[sp].[moe](A)[sp].[moe](T)[sp].[lna]([m5C])[sp].[lna]([m5C])[sp].[lna] |
| | ([m5C])[sp].[lna](A)}$$$$V2.0 |
| 919 | RNA1{[lna]([m5C])[sp].[lna](T)[sp].[lna](T)[sp].[moe](G)[sp].[moe](T)[s |
| | p].[moe](A)[sp].[moe]([m5C])[sp].[moe](T)[sp].[moe](T)[sp].[moe]([m5C |
| | ])[sp].[moe](A)[sp].[moe](T)[sp].[lna]([m5C])[sp].[lna]([m5C])[sp].[lna]([ |
| | m5C])[sp].[lna](A)}$$$$V2.0 |
| 920 | RNA1{[lna]([m5C])[sp].[lna](T)[sp].[lna](T)[sp].[lna](G)[sp].[moe](T)[sp |
| | ].[moe](A)[sp].[moe]([m5C])[sp].[moe](T)[sp].[moe](T)[sp].[moe]([m5C] |
| | )[sp].[moe](A)[sp].[moe](T)[sp].[lna]([m5C])[sp].[lna]([m5C])[sp].[lna]([ |
| | m5C])[sp].[lna](A)}$$$$V2.0 |
| 921 | RNA1{[lna]([m5C])[sp].[lna](T)[sp].[lna](T)[sp].[lna](G)[sp].[lna](T)[sp]. |
| | [moe](A)[sp].[moe]([m5C])[sp].[moe](T)[sp].[moe](T)[sp].[moe]([m5C])[ |
| | sp].[moe](A)[sp].[lna](T)[sp].[lna]([m5C])[sp].[lna]([m5C])[sp].[lna]([m5 |
| | C])[sp].[lna](A)}$$$$V2.0 |
| 922 | RNA1{[moe]([m5C])[sp].[moe](T)[sp].[moe](T)[sp].[moe](G)[sp].[moe]( |
| | T)[sp].[moe](A)[sp].[moe]([m5C])[sp].[moe](T)[sp].[moe](T)[sp].[moe]([ |
| | m5C])[sp].[moe](A)[sp].[moe](T)[sp].[moe]([m5C])[sp].[moe]([m5C])[sp |
| | ].[moe]([m5C])[sp].[lna](A)}$$$$V2.0 |
| 923 | RNA1{[moe]([m5C])[sp].[moe](T)[sp].[moe](T)[sp].[moe](G)[sp].[moe]( |
| | T)[sp].[moe](A)[sp].[moe]([m5C])[sp].[moe](T)[sp].[moe](T)[sp].[moe]([ |
| | m5C])[sp].[moe](A)[sp].[moe](T)[sp].[moe]([m5C])[sp].[moe]([m5C])[sp |
| | ].[lna]([m5C])[sp].[lna](A)}$$$$V2.0 |
| 924 | RNA1{[moe]([m5C])[sp].[moe](T)[sp].[moe](T)[sp].[moe](G)[sp].[moe]( |
| | T)[sp].[moe](A)[sp].[moe]([m5C])[sp].[moe](T)[sp].[moe](T)[sp].[moe]([ |
| | m5C])[sp].[moe](A)[sp].[moe](T)[sp].[moe]([m5C])[sp].[lna]([m5C])[sp]. |
| | [lna]([m5C])[sp].[lna](A)}$$$$V2.0 |
| 925 | RNA1{[lna](T)[sp].[moe](G)[sp].[moe](T)[sp].[moe](T)[sp].[moe]([m5C] |
| | )[sp].[moe](T)[sp].[moe](T)[sp].[moe](G)[sp].[moe](T)[sp].[moe](A)[sp].[ |
| | moe]([m5C])[sp].[moe](T)[sp].[moe](T)[sp].[moe]([m5C])[sp].[moe](A)} |
| | $$$$V2.0 |
| 926 | RNA1{[lna](T)[sp].[lna](G)[sp].[moe](T)[sp].[moe](T)[sp].[moe]([m5C])[ |
| | sp].[moe](T)[sp].[moe](T)[sp].[moe](G)[sp].[moe](T)[sp].[moe](A)[sp].[ |
| | moe]([m5C])[sp].[moe](T)[sp].[moe](T)[sp].[moe]([m5C])[sp].[moe](A)} |
| | $$$$V2.0 |
| 927 | RNA1{[lna](T)[sp].[lna](G)[sp].[lna](T)[sp].[moe](T)[sp].[moe]([m5C])[s |
| | p].[moe](T)[sp].[moe](T)[sp].[moe](G)[sp].[moe](T)[sp].[moe](A)[sp].[m |
| | oe]([m5C])[sp].[moe](T)[sp].[moe](T)[sp].[moe]([m5C])[sp].[moe](A)}$$ |
| | $$V2.0 |
| 928 | RNA1{[lna](T)[sp].[moe](G)[sp].[moe](T)[sp].[moe](T)[sp].[moe]([m5C] |
| | )[sp].[moe](T)[sp].[moe](T)[sp].[moe](G)[sp].[moe](T)[sp].[moe](A)[sp].[ |
| | moe]([m5C])[sp].[moe](T)[sp].[moe](T)[sp].[moe]([m5C])[sp].[lna](A)}$ |
| | $$$V2.0 |
| 929 | RNA1{[lna](T)[sp].[lna](G)[sp].[moe](T)[sp].[moe](T)[sp].[moe]([m5C])[ |
| | sp].[moe](T)[sp].[moe](T)[sp].[moe](G)[sp].[moe](T)[sp].[moe](A)[sp].[ |
| | moe]([m5C])[sp].[moe](T)[sp].[moe](T)[sp].[moe]([m5C])[sp].[lna](A)}$ |
| | $$$V2.0 |
| 930 | RNA1{[lna](T)[sp].[lna](G)[sp].[lna](T)[sp].[moe](T)[sp].[moe]([m5C])[s |
| | p].[moe](T)[sp].[moe](T)[sp].[moe](G)[sp].[moe](T)[sp].[moe](A)[sp].[m |
| | oe]([m5C])[sp].[moe](T)[sp].[moe](T)[sp].[moe]([m5C])[sp].[lna](A)}$$$ |
| | $V2.0 |
| 931 | RNA1{[lna](T)[sp].[moe](G)[sp].[moe](T)[sp].[moe](T)[sp].[moe]([m5C] |
| | )[sp].[moe](T)[sp].[moe](T)[sp].[moe](G)[sp].[moe](T)[sp].[moe](A)[sp].[ |
| | moe]([m5C])[sp].[moe](T)[sp].[moe](T)[sp].[lna]([m5C])[sp].[lna](A)}$$ |
| | $$V2.0 |
| 932 | RNA1{[lna](T)[sp].[lna](G)[sp].[moe](T)[sp].[moe](T)[sp].[moe]([m5C])[ |
| | sp].[moe](T)[sp].[moe](T)[sp].[moe](G)[sp].[moe](T)[sp].[moe](A)[sp].[ |
| | moe]([m5C])[sp].[moe](T)[sp].[moe](T)[sp].[lna]([m5C])[sp].[lna](A)}$$ |
| | $$V2.0 |
| 933 | RNA1{[lna](T)[sp].[lna](G)[sp].[lna](T)[sp].[moe](T)[sp].[moe]([m5C])[s |
| | p].[moe](T)[sp].[moe](T)[sp].[moe](G)[sp].[moe](T)[sp].[moe](A)[sp].[m |
| | oe]([m5C])[sp].[moe](T)[sp].[moe](T)[sp].[lna]([m5C])[sp].[lna](A)}$$$$ |
| | V2.0 |
| 934 | RNA1{[lna](T)[sp].[lna](G)[sp].[lna](T)[sp].[lna](T)[sp].[moe]([m5C])[sp |
| | ].[moe](T)[sp].[moe](T)[sp].[moe](G)[sp].[moe](T)[sp].[moe](A)[sp].[mo |
| | e]([m5C])[sp].[moe](T)[sp].[moe](T)[sp].[lna]([m5C])[sp].[lna](A)}$$$$ |
| | V2.0 |
| 935 | RNA1{[lna](T)[sp].[moe](G)[sp].[moe](T)[sp].[moe](T)[sp].[moe]([m5C] |
| | )[sp].[moe](T)[sp].[moe](T)[sp].[moe](G)[sp].[moe](T)[sp].[moe](A)[sp].[ |
| | moe]([m5C])[sp].[moe](T)[sp].[lna](T)[sp].[lna]([m5C])[sp].[lna](A)}$$$ |
| | $V2.0 |
| 936 | RNA1{[lna](T)[sp].[lna](G)[sp].[moe](T)[sp].[moe](T)[sp].[moe]([m5C])[ |
| | sp].[moe](T)[sp].[moe](T)[sp].[moe](G)[sp].[moe](T)[sp].[moe](A)[sp].[ |
| | moe]([m5C])[sp].[moe](T)[sp].[lna](T)[sp].[lna]([m5C])[sp].[lna](A)}$$$ |
| | $V2.0 |
| 937 | RNA1{[lna](T)[sp].[lna](G)[sp].[lna](T)[sp].[lna](T)[sp].[moe]([m5C])[sp |
| | ].[moe](T)[sp].[moe](T)[sp].[moe](G)[sp].[moe](T)[sp].[moe](A)[sp].[mo |
| | e]([m5C])[sp].[moe](T)[sp].[lna](T)[sp].[lna]([m5C])[sp].[lna](A)}$$$$V |
| | 2.0 |
| 938 | RNA1{[lna](T)[sp].[lna](G)[sp].[moe](T)[sp].[moe](T)[sp].[moe]([m5C])[ |
| | sp].[moe](T)[sp].[moe](T)[sp].[moe](G)[sp].[moe](T)[sp].[moe](A)[sp].[ |
| | moe]([m5C])[sp].[lna](T)[sp].[lna](T)[sp].[lna]([m5C])[sp].[lna](A)}$$$$ |
| | V2.0 |
| 939 | RNA1{[lna](T)[sp].[lna](G)[sp].[lna](T)[sp].[moe](T)[sp].[moe]([m5C])[s |
| | p].[moe](T)[sp].[moe](T)[sp].[moe](G)[sp].[moe](T)[sp].[moe](A)[sp].[m |
| | oe]([m5C])[sp].[lna](T)[sp].[lna](T)[sp].[lna]([m5C])[sp].[lna](A)}$$$$V |
| | 2.0 |
| 940 | RNA1{[lna](T)[sp].[lna](G)[sp].[lna](T)[sp].[lna](T)[sp].[moe]([m5C])[sp |
| | ].[moe](T)[sp].[moe](T)[sp].[moe](G)[sp].[moe](T)[sp].[moe](A)[sp].[mo |
| | e]([m5C])[sp].[lna](T)[sp].[lna](T)[sp].[lna]([m5C])[sp].[lna](A)}$$$$V2. |
| | 0 |
| 941 | RNA1{[lna](T)[sp].[lna](G)[sp].[lna](T)[sp].[lna](T)[sp].[lna]([m5C])[sp]. |
| | [moe](T)[sp].[moe](T)[sp].[moe](G)[sp].[moe](T)[sp].[moe](A)[sp].[lna]( |
| | [m5C])[sp].[lna](T)[sp].[lna](T)[sp].[lna]([m5C])[sp].[lna](A)}$$$$V2.0 |
| 942 | RNA1{[moe](T)[sp].[moe](G)[sp].[moe](T)[sp].[moe](T)[sp].[moe]([m5C |
| | ])[sp].[moe](T)[sp].[moe](T)[sp].[moe](G)[sp].[moe](T)[sp].[moe](A)[sp]. |
| | [moe]([m5C])[sp].[moe](T)[sp].[moe](T)[sp].[lna]([m5C])[sp].[lna](A)}$ |
| | $$$V2.0 |
| 943 | RNA1{[moe](T)[sp].[moe](G)[sp].[moe](T)[sp].[moe](T)[sp].[moe]([m5C |
| | ])[sp].[moe](T)[sp].[moe](T)[sp].[moe](G)[sp].[moe](T)[sp].[moe](A)[sp]. |
| | [moe]([m5C])[sp].[moe](T)[sp].[lna](T)[sp].[lna]([m5C])[sp].[lna](A)}$$ |
| | $$V2.0 |
| 944 | RNA1{[lna](G)[sp].[moe](T)[sp].[moe](G)[sp].[moe](T)[sp].[moe](T)[sp] |
| | .[moe]([m5C])[sp].[moe](T)[sp].[moe](T)[sp].[moe](G)[sp].[moe](T)[sp].[ |
| | moe](A)[sp].[moe]([m5C])[sp].[moe](T)[sp].[moe](T)[sp].[moe]([m5C])} |
| | $$$$V2.0 |
| 945 | RNA1{[lna](G)[sp].[lna](T)[sp].[moe](G)[sp].[moe](T)[sp].[moe](T)[sp].[ |
| | moe]([m5C])[sp].[moe](T)[sp].[moe](T)[sp].[moe](G)[sp].[moe](T)[sp].[ |
| | moe](A)[sp].[moe]([m5C])[sp].[moe](T)[sp].[moe](T)[sp].[moe]([m5C])} |
| | $$$$V2.0 |
| 946 | RNA1{[lna](G)[sp].[lna](T)[sp].[lna](G)[sp].[moe](T)[sp].[moe](T)[sp].[ |
| | moe]([m5C])[sp].[moe](T)[sp].[moe](T)[sp].[moe](G)[sp].[moe](T)[sp].[ |
| | moe](A)[sp].[moe]([m5C])[sp].[moe](T)[sp].[moe](T)[sp].[moe]([m5C])} |
| | $$$$V2.0 |
| 947 | RNA1{[lna](G)[sp].[moe](T)[sp].[moe](G)[sp].[moe](T)[sp].[moe](T)[sp] |
| | .[moe]([m5C])[sp].[moe](T)[sp].[moe](T)[sp].[moe](G)[sp].[moe](T)[sp].[ |
| | moe](A)[sp].[moe]([m5C])[sp].[moe](T)[sp].[moe](T)[sp].[lna]([m5C])}$ |
| | $$$V2.0 |
| 948 | RNA1{[lna](G)[sp].[lna](T)[sp].[moe](G)[sp].[moe](T)[sp].[moe](T)[sp].[ |
| | moe]([m5C])[sp].[moe](T)[sp].[moe](T)[sp].[moe](G)[sp].[moe](T)[sp].[ |
| | $$$V2.0 |
| 949 | RNA1{[lna](G)[sp].[lna](T)[sp].[lna](G)[sp].[moe](T)[sp].[moe](T)[sp].[ |
| | moe]([m5C])[sp].[moe](T)[sp].[moe](T)[sp].[moe](G)[sp].[moe](T)[sp].[ |
| | moe](A)[sp].[moe]([m5C])[sp].[moe](T)[sp].[moe](T)[sp].[lna]([m5C])}$ |
| | $$$V2.0 |
| 950 | RNA1{[lna](G)[sp].[moe](T)[sp].[moe](G)[sp].[moe](T)[sp].[moe](T)[sp] |
| | .[moe]([m5C])[sp].[moe](T)[sp].[moe](T)[sp].[moe](G)[sp].[moe](T)[sp].[ |
| | moe](A)[sp].[moe]([m5C])[sp].[moe](T)[sp].[lna](T)[sp].[lna]([m5C])}$$ |
| | $$V2.0 |
| 951 | RNA1{[lna](G)[sp].[lna](T)[sp].[moe](G)[sp].[moe](T)[sp].[moe](T)[sp].[ |
| | moe]([m5C])[sp].[moe](T)[sp].[moe](T)[sp].[moe](G)[sp].[moe](T)[sp].[ |
| | moe](A)[sp].[moe]([m5C])[sp].[moe](T)[sp].[lna](T)[sp].[lna]([m5C])}$$ |
| | $$V2.0 |
| 952 | RNA1{[lna](G)[sp].[lna](T)[sp].[lna](G)[sp].[moe](T)[sp].[moe](T)[sp].[ |
| | moe]([m5C])[sp].[moe](T)[sp].[moe](T)[sp].[moe](G)[sp].[moe](T)[sp].[ |
| | moe](A)[sp].[moe]([m5C])[sp].[moe](T)[sp].[lna](T)[sp].[lna]([m5C])}$$ |
| | $$V2.0 |
| 953 | RNA1{[lna](G)[sp].[lna](T)[sp].[lna](G)[sp].[lna](T)[sp].[moe](T)[sp].[m |
| | oe]([m5C])[sp].[moe](T)[sp].[moe](T)[sp].[moe](G)[sp].[moe](T)[sp].[mo |
| | e](A)[sp].[moe]([m5C])[sp].[moe](T)[sp].[lna](T)[sp].[lna]([m5C])}$$$$ |
| | V2.0 |
| 954 | RNA1{[lna](G)[sp].[moe](T)[sp].[moe](G)[sp].[moe](T)[sp].[moe](T)[sp] |
| | .[moe]([m5C])[sp].[moe](T)[sp].[moe](T)[sp].[moe](G)[sp].[moe](T)[sp].[ |
| | moe](A)[sp].[moe]([m5C])[sp].[lna](T)[sp].[lna](T)[sp].[lna]([m5C])}$$$ |
| | $V2.0 |
| 955 | RNA1{[lna](G)[sp].[lna](T)[sp].[moe](G)[sp].[moe](T)[sp].[moe](T)[sp].[ |
| | moe]([m5C])[sp].[moe](T)[sp].[moe](T)[sp].[moe](G)[sp].[moe](T)[sp].[ |
| | moe](A)[sp].[moe]([m5C])[sp].[lna](T)[sp].[lna](T)[sp].[lna]([m5C])}$$$ |
| | $V2.0 |
| 956 | RNA1{[lna](G)[sp].[lna](T)[sp].[lna](G)[sp].[lna](T)[sp].[moe](T)[sp].[m |
| | oe]([m5C])[sp].[moe](T)[sp].[moe](T)[sp].[moe](G)[sp].[moe](T)[sp].[mo |
| | e](A)[sp].[moe]([m5C])[sp].[lna](T)[sp].[lna](T)[sp].[lna]([m5C])}$$$$V |
| | 2.0 |
| 957 | RNA1{[lna](G)[sp].[lna](T)[sp].[moe](G)[sp].[moe](T)[sp].[moe](T)[sp].[ |
| | moe]([m5C])[sp].[moe](T)[sp].[moe](T)[sp].[moe](G)[sp].[moe](T)[sp].[ |
| | moe](A)[sp].[lna]([m5C])[sp].[lna](T)[sp].[lna](T)[sp].[lna]([m5C])}$$$$ |
| | V2.0 |
| 958 | RNA1{[lna](G)[sp].[lna](T)[sp].[lna](G)[sp].[moe](T)[sp].[moe](T)[sp].[ |
| | moe]([m5C])[sp].[moe](T)[sp].[moe](T)[sp].[moe](G)[sp].[moe](T)[sp].[ |
| | moe](A)[sp].[lna]([m5C])[sp].[lna](T)[sp].[lna](T)[sp].[lna]([m5C])}$$$$ |
| | V2.0 |
| 959 | RNA1{[lna](G)[sp].[lna](T)[sp].[lna](G)[sp].[lna](T)[sp].[moe](T)[sp].[m |
| | oe]([m5C])[sp].[moe](T)[sp].[moe](T)[sp].[moe](G)[sp].[moe](T)[sp].[mo |
| | e](A)[sp].[lna]([m5C])[sp].[lna](T)[sp].[lna](T)[sp].[lna]([m5C])}$$$$V2. |
| | 0 |
| 960 | RNA1{[lna](G)[sp].[lna](T)[sp].[lna](G)[sp].[lna](T)[sp].[lna](T)[sp].[mo |
| | e]([m5C])[sp].[moe](T)[sp].[moe](T)[sp].[moe](G)[sp].[moe](T)[sp].[lna]( |
| | A)[sp].[lna]([m5C])[sp].[lna](T)[sp].[lna](T)[sp].[lna]([m5C])}$$$$V2.0 |
| 961 | RNA1{[moe](G)[sp].[moe](T)[sp].[moe](G)[sp].[moe](T)[sp].[moe](T)[sp |
| | ].[moe]([m5C])[sp].[moe](T)[sp].[moe](T)[sp].[moe](G)[sp].[moe](T)[sp]. |
| | [moe](A)[sp].[moe]([m5C])[sp].[moe](T)[sp].[moe](T)[sp].[lna]([m5C])} |
| | $$$$V2.0 |
| 962 | RNA1{[moe](G)[sp].[moe](T)[sp].[moe](G)[sp].[moe](T)[sp].[moe](T)[sp |
| | ].[moe]([m5C])[sp].[moe](T)[sp].[moe](T)[sp].[moe](G)[sp].[moe](T)[sp]. |
| | [moe](A)[sp].[moe]([m5C])[sp].[lna](T)[sp].[lna](T)[sp].[lna]([m5C])}$$ |
| | $$V2.0 |
| 963 | RNA1{[lna](T)[sp].[moe]([m5C])[sp].[moe](T)[sp].[moe](T)[sp].[moe](G |
| | )[sp].[moe](T)[sp].[moe](A)[sp].[moe]([m5C])[sp].[moe](T)[sp].[moe](T) |
| | [sp].[moe]([m5C])[sp].[moe](A)[sp].[moe](T)[sp].[moe]([m5C])[sp].[moe |
| | ]([m5C])[sp].[moe]([m5C])}$$$$V2.0 |
| 964 | RNA1{[lna](T)[sp].[lna]([m5C])[sp].[moe](T)[sp].[moe](T)[sp].[moe](G)[ |
| | sp].[moe](T)[sp].[moe](A)[sp].[moe]([m5C])[sp].[moe](T)[sp].[moe](T)[s |
| | p].[moe]([m5C])[sp].[moe](A)[sp].[moe](T)[sp].[moe]([m5C])[sp].[moe]( |
| | [m5C])[sp].[moe]([m5C])}$$$$V2.0 |
| 965 | RNA1{[lna](T)[sp].[lna]([m5C])[sp].[lna](T)[sp].[moe](T)[sp].[moe](G)[s |
| | p].[moe](T)[sp].[moe](A)[sp].[moe]([m5C])[sp].[moe](T)[sp].[moe](T)[sp |
| | ].[moe]([m5C])[sp].[moe](A)[sp].[moe](T)[sp].[moe]([m5C])[sp].[moe]([ |
| | m5C])[sp].[moe]([m5C])}$$$$V2.0 |
| 966 | RNA1{[lna](T)[sp].[moe]([m5C])[sp].[moe](T)[sp].[moe](T)[sp].[moe](G |
| | )[sp].[moe](T)[sp].[moe](A)[sp].[moe]([m5C])[sp].[moe](T)[sp].[moe](T) |
| | [sp].[moe]([m5C])[sp].[moe](A)[sp].[moe](T)[sp].[moe]([m5C])[sp].[moe |
| | ]([m5C])[sp].[lna]([m5C])}$$$$V2.0 |
| 967 | RNA1{[lna](T)[sp].[lna]([m5C])[sp].[moe](T)[sp].[moe](T)[sp].[moe](G)[ |
| | sp].[moe](T)[sp].[moe](A)[sp].[moe]([m5C])[sp].[moe](T)[sp].[moe](T)[s |
| | p].[moe]([m5C])[sp].[moe](A)[sp].[moe](T)[sp].[moe]([m5C])[sp].[moe]( |
| | [m5C])[sp].[lna]([m5C])}$$$$V2.0 |
| 968 | RNA1{[lna](T)[sp].[lna]([m5C])[sp].[lna](T)[sp].[moe](T)[sp].[moe](G)[s |
| | p].[moe](T)[sp].[moe](A)[sp].[moe]([m5C])[sp].[moe](T)[sp].[moe](T)[sp |
| | ].[moe]([m5C])[sp].[moe](A)[sp].[moe](T)[sp].[moe]([m5C])[sp].[moe]([ |
| | m5C])[sp].[lna]([m5C])}$$$$V2.0 |
| 969 | RNA1{[lna](T)[sp].[moe]([m5C])[sp].[moe](T)[sp].[moe](T)[sp].[moe](G |
| | )[sp].[moe](T)[sp].[moe](A)[sp].[moe]([m5C])[sp].[moe](T)[sp].[moe](T) |
| | [sp].[moe]([m5C])[sp].[moe](A)[sp].[moe](T)[sp].[moe]([m5C])[sp].[lna]( |
| | [m5C])[sp].[lna]([m5C])}$$$$V2.0 |
| 970 | RNA1{[lna](T)[sp].[lna]([m5C])[sp].[moe](T)[sp].[moe](T)[sp].[moe](G)[ |
| | sp].[moe](T)[sp].[moe](A)[sp].[moe]([m5C])[sp].[moe](T)[sp].[moe](T)[s |
| | p].[moe]([m5C])[sp].[moe](A)[sp].[moe](T)[sp].[moe]([m5C])[sp].[lna]([ |
| | m5C])[sp].[lna]([m5C])}$$$$V2.0 |
| 971 | RNA1{[lna](T)[sp].[lna]([m5C])[sp].[lna](T)[sp].[moe](T)[sp].[moe](G)[s |
| | p].[moe](T)[sp].[moe](A)[sp].[moe]([m5C])[sp].[moe](T)[sp].[moe](T)[sp |
| | ].[moe]([m5C])[sp].[moe](A)[sp].[moe](T)[sp].[moe]([m5C])[sp].[lna]([m |
| | 5C])[sp].[lna]([m5C])}$$$$V2.0 |
| 972 | RNA1{[lna](T)[sp].[lna]([m5C])[sp].[lna](T)[sp].[lna](T)[sp].[moe](G)[sp |
| | ].[moe](T)[sp].[moe](A)[sp].[moe]([m5C])[sp].[moe](T)[sp].[moe](T)[sp]. |
| | [moe]([m5C])[sp].[moe](A)[sp].[moe](T)[sp].[moe]([m5C])[sp].[lna]([m5 |
| | C])[sp].[lna]([m5C])}$$$$V2.0 |
| 973 | RNA1{[lna](T)[sp].[moe]([m5C])[sp].[moe](T)[sp].[moe](T)[sp].[moe](G |
| | )[sp].[moe](T)[sp].[moe](A)[sp].[moe]([m5C])[sp].[moe](T)[sp].[moe](T) |
| | [sp].[moe]([m5C])[sp].[moe](A)[sp].[moe](T)[sp].[lna]([m5C])[sp].[lna]([ |
| | m5C])[sp].[lna]([m5C])}$$$$V2.0 |
| 974 | RNA1{[lna](T)[sp].[lna]([m5C])[sp].[moe](T)[sp].[moe](T)[sp].[moe](G)[ |
| | sp].[moe](T)[sp].[moe](A)[sp].[moe]([m5C])[sp].[moe](T)[sp].[moe](T)[s |
| | p].[moe]([m5C])[sp].[moe](A)[sp].[moe](T)[sp].[lna]([m5C])[sp].[lna]([m |
| | 5C])[sp].[lna]([m5C])}$$$$V2.0 |
| 975 | RNA1{[lna](T)[sp].[lna]([m5C])[sp].[lna](T)[sp].[lna](T)[sp].[moe](G)[sp |
| | ].[moe](T)[sp].[moe](A)[sp].[moe]([m5C])[sp].[moe](T)[sp].[moe](T)[sp]. |
| | [moe]([m5C])[sp].[moe](A)[sp].[moe](T)[sp].[lna]([m5C])[sp].[lna]([m5C |
| | ])[sp].[lna]([m5C])}$$$$V2.0 |
| 976 | RNA1{[lna](T)[sp].[lna]([m5C])[sp].[moe](T)[sp].[moe](T)[sp].[moe](G)[ |
| | sp].[moe](T)[sp].[moe](A)[sp].[moe]([m5C])[sp].[moe](T)[sp].[moe](T)[s |
| | p].[moe]([m5C])[sp].[moe](A)[sp].[lna](T)[sp].[lna]([m5C])[sp].[lna]([m5 |
| | C])[sp].[lna]([m5C])}$$$$V2.0 |
| 977 | RNA1{[lna](T)[sp].[lna]([m5C])[sp].[lna](T)[sp].[moe](T)[sp].[moe](G)[s |
| | p].[moe](T)[sp].[moe](A)[sp].[moe]([m5C])[sp].[moe](T)[sp].[moe](T)[sp |
| | ].[moe]([m5C])[sp].[moe](A)[sp].[lna](T)[sp].[lna]([m5C])[sp].[lna]([m5C |
| | ])[sp].[lna]([m5C])}$$$$V2.0 |
| 978 | RNA1{[lna](T)[sp].[lna]([m5C])[sp].[lna](T)[sp].[lna](T)[sp].[moe](G)[sp |
| | ].[moe](T)[sp].[moe](A)[sp].[moe]([m5C])[sp].[moe](T)[sp].[moe](T)[sp]. |
| | [moe]([m5C])[sp].[moe](A)[sp].[lna](T)[sp].[lna]([m5C])[sp].[lna]([m5C] |
| | )[sp].[lna]([m5C])}$$$$V2.0 |
| 979 | RNA1{[lna](T)[sp].[lna]([m5C])[sp].[lna](T)[sp].[lna](T)[sp].[lna](G)[sp]. |
| | [moe](T)[sp].[moe](A)[sp].[moe]([m5C])[sp].[moe](T)[sp].[moe](T)[sp].[ |
| | moe]([m5C])[sp].[lna](A)[sp].[lna](T)[sp].[lna]([m5C])[sp].[lna]([m5C])[s |
| | p].[lna]([m5C])}$$$$V2.0 |
| 980 | RNA1{[moe](T)[sp].[moe]([m5C])[sp].[moe](T)[sp].[moe](T)[sp].[moe]( |
| | G)[sp].[moe](T)[sp].[moe](A)[sp].[moe]([m5C])[sp].[moe](T)[sp].[moe]( |
| | T)[sp].[moe]([m5C])[sp].[moe](A)[sp].[moe](T)[sp].[moe]([m5C])[sp].[m |
| | oe]([m5C])[sp].[lna]([m5C])}$$$$V2.0 |
| 981 | RNA1{[moe](T)[sp].[moe]([m5C])[sp].[moe](T)[sp].[moe](T)[sp].[moe]( |
| | G)[sp].[moe](T)[sp].[moe](A)[sp].[moe]([m5C])[sp].[moe](T)[sp].[moe]( |
| | T)[sp].[moe]([m5C])[sp].[moe](A)[sp].[moe](T)[sp].[moe]([m5C])[sp].[ln |
| | a]([m5C])[sp].[lna]([m5C])}$$$$V2.0 |
| 982 | RNA1{[moe](T)[sp].[moe]([m5C])[sp].[moe](T)[sp].[moe](T)[sp].[moe]( |
| | G)[sp].[moe](T)[sp].[moe](A)[sp].[moe]([m5C])[sp].[moe](T)[sp].[moe]( |
| | T)[sp].[moe]([m5C])[sp].[moe](A)[sp].[moe](T)[sp].[lna]([m5C])[sp].[lna |
| | ]([m5C])[sp].[lna]([m5C])}$$$$V2.0 |
| 983 | RNA1{[lna](T)[sp].[lna](T)[sp].[moe]([m5C])[sp].[moe](T)[sp].[moe](T)[ |
| | sp].[moe](G)[sp].[moe](T)[sp].[moe](A)[sp].[moe]([m5C])[sp].[moe](T)[s |
| | p].[moe](T)[sp].[moe]([m5C])[sp].[moe](A)[sp].[moe](T)[sp].[lna]([m5C] |
| | )[sp].[lna]([m5C])}$$$$V2.0 |
| 984 | RNA1{[lna](T)[sp].[moe](T)[sp].[moe]([m5C])[sp].[moe](T)[sp].[moe](T |
| | )[sp].[moe](G)[sp].[moe](T)[sp].[moe](A)[sp].[moe]([m5C])[sp].[moe](T) |
| | [sp].[moe](T)[sp].[moe]([m5C])[sp].[moe](A)[sp].[moe](T)[sp].[moe]([m |
| | 5C])[sp].[moe]([m5C])}$$$$V2.0 |
| 985 | RNA1{[lna](T)[sp].[lna](T)[sp].[moe]([m5C])[sp].[moe](T)[sp].[moe](T)[ |
| | sp].[moe](G)[sp].[moe](T)[sp].[moe](A)[sp].[moe]([m5C])[sp].[moe](T)[s |
| | p].[moe](T)[sp].[moe]([m5C])[sp].[moe](A)[sp].[moe](T)[sp].[moe]([m5C |
| | ])[sp].[moe]([m5C])}$$$$V2.0 |
| 986 | RNA1{[lna](T)[sp].[lna](T)[sp].[lna]([m5C])[sp].[moe](T)[sp].[moe](T)[s |
| | p].[moe](G)[sp].[moe](T)[sp].[moe](A)[sp].[moe]([m5C])[sp].[moe](T)[sp |
| | ].[moe](T)[sp].[moe]([m5C])[sp].[moe](A)[sp].[moe](T)[sp].[moe]([m5C] |
| | )[sp].[moe]([m5C])}$$$$V2.0 |
| 987 | RNA1{[lna](T)[sp].[moe](T)[sp].[moe]([m5C])[sp].[moe](T)[sp].[moe](T |
| | )[sp].[moe](G)[sp].[moe](T)[sp].[moe](A)[sp].[moe]([m5C])[sp].[moe](T) |
| | [sp].[moe](T)[sp].[moe]([m5C])[sp].[moe](A)[sp].[moe](T)[sp].[moe]([m |
| | 5C])[sp].[lna]([m5C])}$$$$V2.0 |
| 988 | RNA1{[lna](T)[sp].[lna](T)[sp].[moe]([m5C])[sp].[moe](T)[sp].[moe](T)[ |
| | sp].[moe](G)[sp].[moe](T)[sp].[moe](A)[sp].[moe]([m5C])[sp].[moe](T)[s |
| | p].[moe](T)[sp].[moe]([m5C])[sp].[moe](A)[sp].[moe](T)[sp].[moe]([m5C |
| | ])[sp].[lna]([m5C])}$$$$V2.0 |
| 989 | RNA1{[lna](T)[sp].[lna](T)[sp].[lna]([m5C])[sp].[moe](T)[sp].[moe](T)[s |
| | p].[moe](G)[sp].[moe](T)[sp].[moe](A)[sp].[moe]([m5C])[sp].[moe](T)[sp |
| | ].[moe](T)[sp].[moe]([m5C])[sp].[moe](A)[sp].[moe](T)[sp].[moe]([m5C] |
| | )[sp].[lna]([m5C])}$$$$V2.0 |
| 990 | RNA1{[lna](T)[sp].[moe](T)[sp].[moe]([m5C])[sp].[moe](T)[sp].[moe](T |
| | )[sp].[moe](G)[sp].[moe](T)[sp].[moe](A)[sp].[moe]([m5C])[sp].[moe](T) |
| | [sp].[moe](T)[sp].[moe]([m5C])[sp].[moe](A)[sp].[moe](T)[sp].[lna]([m5 |
| | C])[sp].[lna]([m5C])}$$$$V2.0 |
| 991 | RNA1{[lna](T)[sp].[lna](T)[sp].[lna]([m5C])[sp].[moe](T)[sp].[moe](T)[s |
| | p].[moe](G)[sp].[moe](T)[sp].[moe](A)[sp].[moe]([m5C])[sp].[moe](T)[sp |
| | ].[moe](T)[sp].[moe]([m5C])[sp].[moe](A)[sp].[moe](T)[sp].[lna]([m5C])[ |
| | sp].[lna]([m5C])}$$$$V2.0 |
| 992 | RNA1{[lna](T)[sp].[lna](T)[sp].[lna]([m5C])[sp].[lna](T)[sp].[moe](T)[sp |
| | ].[moe](G)[sp].[moe](T)[sp].[moe](A)[sp].[moe]([m5C])[sp].[moe](T)[sp] |
| | .[moe](T)[sp].[moe]([m5C])[sp].[moe](A)[sp].[moe](T)[sp].[lna]([m5C])[ |
| | sp].[lna]([m5C])}$$$$V2.0 |
| 993 | RNA1{[lna](T)[sp].[moe](T)[sp].[moe]([m5C])[sp].[moe](T)[sp].[moe](T |
| | )[sp].[moe](G)[sp].[moe](T)[sp].[moe](A)[sp].[moe]([m5C])[sp].[moe](T) |
| | [sp].[moe](T)[sp].[moe]([m5C])[sp].[moe](A)[sp].[lna](T)[sp].[lna]([m5C |
| | ])[sp].[lna]([m5C])}$$$$V2.0 |
| 994 | RNA1{[lna](T)[sp].[lna](T)[sp].[moe]([m5C])[sp].[moe](T)[sp].[moe](T)[ |
| | sp].[moe](G)[sp].[moe](T)[sp].[moe](A)[sp].[moe]([m5C])[sp].[moe](T)[s |
| | p].[moe](T)[sp].[moe]([m5C])[sp].[moe](A)[sp].[lna](T)[sp].[lna]([m5C])[ |
| | sp].[lna]([m5C])}$$$$V2.0 |
| 995 | RNA1{[lna](T)[sp].[lna](T)[sp].[lna]([m5C])[sp].[lna](T)[sp].[moe](T)[sp |
| | ].[moe](G)[sp].[moe](T)[sp].[moe](A)[sp].[moe]([m5C])[sp].[moe](T)[sp] |
| | .[moe](T)[sp].[moe]([m5C])[sp].[moe](A)[sp].[lna](T)[sp].[lna]([m5C])[s |
| | p].[lna]([m5C])}$$$$V2.0 |
| 996 | RNA1{[lna](T)[sp].[lna](T)[sp].[moe]([m5C])[sp].[moe](T)[sp].[moe](T)[ |
| | sp].[moe](G)[sp].[moe](T)[sp].[moe](A)[sp].[moe]([m5C])[sp].[moe](T)[s |
| | p].[moe](T)[sp].[moe]([m5C])[sp].[lna](A)[sp].[lna](T)[sp].[lna]([m5C])[s |
| | p].[lna]([m5C])}$$$$V2.0 |
| 997 | RNA1{[lna](T)[sp].[lna](T)[sp].[lna]([m5C])[sp].[moe](T)[sp].[moe](T)[s |
| | p].[moe](G)[sp].[moe](T)[sp].[moe](A)[sp].[moe]([m5C])[sp].[moe](T)[sp |
| | ].[moe](T)[sp].[moe]([m5C])[sp].[lna](A)[sp].[lna](T)[sp].[lna]([m5C])[sp |
| | ].[lna]([m5C])}$$$$V2.0 |
| 998 | RNA1{[lna](T)[sp].[lna](T)[sp].[lna]([m5C])[sp].[lna](T)[sp].[moe](T)[sp |
| | ].[moe](G)[sp].[moe](T)[sp].[moe](A)[sp].[moe]([m5C])[sp].[moe](T)[sp] |
| | .[moe](T)[sp].[moe]([m5C])[sp].[lna](A)[sp].[lna](T)[sp].[lna]([m5C])[sp] |
| | .[lna]([m5C])}$$$$V2.0 |
| 999 | RNA1{[lna](T)[sp].[lna](T)[sp].[lna]([m5C])[sp].[lna](T)[sp].[lna](T)[sp]. |
| | [moe](G)[sp].[moe](T)[sp].[moe](A)[sp].[moe]([m5C])[sp].[moe](T)[sp].[ |
| | moe](T)[sp].[lna]([m5C])[sp].[lna](A)[sp].[lna](T)[sp].[lna]([m5C])[sp].[] |
| | na]([m5C])}$$$$V2.0 |
| 1000 | RNA1{[moe](T)[sp].[moe](T)[sp].[moe]([m5C])[sp].[moe](T)[sp].[moe]( |
| | T)[sp].[moe](G)[sp].[moe](T)[sp].[moe](A)[sp].[moe]([m5C])[sp].[moe]( |
| | T)[sp].[moe](T)[sp].[moe]([m5C])[sp].[moe](A)[sp].[moe](T)[sp].[moe]([ |
| | m5C])[sp].[lna]([m5C])}$$$$V2.0 |
| 1001 | RNA1{[moe](T)[sp].[moe](T)[sp].[moe]([m5C])[sp].[moe](T)[sp].[moe]( |
| | T)[sp].[moe](G)[sp].[moe](T)[sp].[moe](A)[sp].[moe]([m5C])[sp].[moe]( |
| | T)[sp].[moe](T)[sp].[moe]([m5C])[sp].[moe](A)[sp].[moe](T)[sp].[lna]([m |
| | 5C])[sp].[lna]([m5C])}$$$$V2.0 |
| 1002 | RNA1{[moe](T)[sp].[moe](T)[sp].[moe]([m5C])[sp].[moe](T)[sp].[moe]( |
| | T)[sp].[moe](G)[sp].[moe](T)[sp].[moe](A)[sp].[moe]([m5C])[sp].[moe]( |
| | T)[sp].[moe](T)[sp].[moe]([m5C])[sp].[moe](A)[sp].[lna](T)[sp].[lna]([m5 |
| | C])[sp].[lna]([m5C])}$$$$V2.0 |
| 1003 | RNA1{[lna](G)[sp].[lna](T)[sp].[moe](T)[sp].[moe]([m5C])[sp].[moe](T)[ |
| | sp].[moe](T)[sp].[moe](G)[sp].[moe](T)[sp].[moe](A)[sp].[moe]([m5C])[s |
| | p].[moe](T)[sp].[moe](T)[sp].[moe]([m5C])[sp].[moe](A)[sp].[lna](T)[sp]. |
| | [lna]([m5C])}$$$$V2.0 |
| 1004 | RNA1{[lna](G)[sp].[moe](T)[sp].[moe](T)[sp].[moe]([m5C])[sp].[moe](T |
| | )[sp].[moe](T)[sp].[moe](G)[sp].[moe](T)[sp].[moe](A)[sp].[moe]([m5C]) |
| | [sp].[moe](T)[sp].[moe](T)[sp].[moe]([m5C])[sp].[moe](A)[sp].[moe](T)[ |
| | sp].[moe]([m5C])}$$$$V2.0 |
| 1005 | RNA1{[lna](G)[sp].[lna](T)[sp].[moe](T)[sp].[moe]([m5C])[sp].[moe](T)[ |
| | sp].[moe](T)[sp].[moe](G)[sp].[moe](T)[sp].[moe](A)[sp].[moe]([m5C])[s |
| | p].[moe](T)[sp].[moe](T)[sp].[moe]([m5C])[sp].[moe](A)[sp].[moe](T)[sp |
| | ].[moe]([m5C])}$$$$V2.0 |
| 1006 | RNA1{[lna](G)[sp].[lna](T)[sp].[lna](T)[sp].[moe]([m5C])[sp].[moe](T)[s |
| | p].[moe](T)[sp].[moe](G)[sp].[moe](T)[sp].[moe](A)[sp].[moe]([m5C])[sp |
| | ].[moe](T)[sp].[moe](T)[sp].[moe]([m5C])[sp].[moe](A)[sp].[moe](T)[sp]. |
| | [moe]([m5C])}$$$$V2.0 |
| 1007 | RNA1{[lna](G)[sp].[lna](T)[sp].[moe](T)[sp].[moe]([m5C])[sp].[moe](T)[ |
| | sp].[moe](T)[sp].[moe](G)[sp].[moe](T)[sp].[moe](A)[sp].[moe]([m5C])[s |
| | p].[moe](T)[sp].[moe](T)[sp].[moe]([m5C])[sp].[moe](A)[sp].[moe](T)[sp |
| | ].[lna]([m5C])}$$$$V2.0 |
| 1008 | RNA1{[lna](G)[sp].[lna](T)[sp].[lna](T)[sp].[moe]([m5C])[sp].[moe](T)[s |
| | p].[moe](T)[sp].[moe](G)[sp].[moe](T)[sp].[moe](A)[sp].[moe]([m5C])[sp |
| | ].[moe](T)[sp].[moe](T)[sp].[moe]([m5C])[sp].[moe](A)[sp].[moe](T)[sp]. |
| | [lna]([m5C])}$$$$V2.0 |
| 1009 | RNA1{[lna](G)[sp].[moe](T)[sp].[moe](T)[sp].[moe]([m5C])[sp].[moe](T |
| | )[sp].[moe](T)[sp].[moe](G)[sp].[moe](T)[sp].[moe](A)[sp].[moe]([m5C]) |
| | [sp].[moe](T)[sp].[moe](T)[sp].[moe]([m5C])[sp].[moe](A)[sp].[lna](T)[s |
| | p].[lna]([m5C])}$$$$V2.0 |
| 1010 | RNA1{[lna](G)[sp].[lna](T)[sp].[lna](T)[sp].[moe]([m5C])[sp].[moe](T)[s |
| | p].[moe](T)[sp].[moe](G)[sp].[moe](T)[sp].[moe](A)[sp].[moe]([m5C])[sp |
| | ].[moe](T)[sp].[moe](T)[sp].[moe]([m5C])[sp].[moe](A)[sp].[lna](T)[sp].[ |
| | lna]([m5C])}$$$$V2.0 |
| 1011 | RNA1{[lna](G)[sp].[lna](T)[sp].[lna](T)[sp].[lna]([m5C])[sp].[moe](T)[sp |
| | ].[moe](T)[sp].[moe](G)[sp].[moe](T)[sp].[moe](A)[sp].[moe]([m5C])[sp] |
| | .[moe](T)[sp].[moe](T)[sp].[moe]([m5C])[sp].[moe](A)[sp].[lna](T)[sp].[l |
| | na]([m5C])}$$$$V2.0 |
| 1012 | RNA1{[lna](G)[sp].[moe](T)[sp].[moe](T)[sp].[moe]([m5C])[sp].[moe](T |
| | )[sp].[moe](T)[sp].[moe](G)[sp].[moe](T)[sp].[moe](A)[sp].[moe]([m5C]) |
| | [sp].[moe](T)[sp].[moe](T)[sp].[moe]([m5C])[sp].[lna](A)[sp].[lna](T)[sp] |
| | .[lna]([m5C])}$$$$V2.0 |
| 1013 | RNA1{[lna](G)[sp].[lna](T)[sp].[moe](T)[sp].[moe]([m5C])[sp].[moe](T)[ |
| | sp].[moe](T)[sp].[moe](G)[sp].[moe](T)[sp].[moe](A)[sp].[moe]([m5C])[s |
| | p].[moe](T)[sp].[moe](T)[sp].[moe]([m5C])[sp].[lna](A)[sp].[lna](T)[sp].[ |
| | lna]([m5C])}$$$$V2.0 |
| 1014 | RNA1{[lna](G)[sp].[lna](T)[sp].[lna](T)[sp].[lna]([m5C])[sp].[moe](T)[sp |
| | ].[moe](T)[sp].[moe](G)[sp].[moe](T)[sp].[moe](A)[sp].[moe]([m5C])[sp] |
| | .[moe](T)[sp].[moe](T)[sp].[moe]([m5C])[sp].[lna](A)[sp].[lna](T)[sp].[ln |
| | a]([m5C])}$$$$V2.0 |
| 1015 | RNA1{[lna](G)[sp].[lna](T)[sp].[moe](T)[sp].[moe]([m5C])[sp].[moe](T)[ |
| | sp].[moe](T)[sp].[moe](G)[sp].[moe](T)[sp].[moe](A)[sp].[moe]([m5C])[s |
| | p].[moe](T)[sp].[moe](T)[sp].[lna]([m5C])[sp].[lna](A)[sp].[lna](T)[sp].[l |
| | na]([m5C])}$$$$V2.0 |
| 1016 | RNA1{[lna](G)[sp].[lna](T)[sp].[lna](T)[sp].[moe]([m5C])[sp].[moe](T)[s |
| | p].[moe](T)[sp].[moe](G)[sp].[moe](T)[sp].[moe](A)[sp].[moe]([m5C])[sp |
| | ].[moe](T)[sp].[moe](T)[sp].[lna]([m5C])[sp].[lna](A)[sp].[lna](T)[sp].[lna |
| | ]([m5C])}$$$$V2.0 |
| 1017 | RNA1{[lna](G)[sp].[lna](T)[sp].[lna](T)[sp].[lna]([m5C])[sp].[moe](T)[sp |
| | ].[moe](T)[sp].[moe](G)[sp].[moe](T)[sp].[moe](A)[sp].[moe]([m5C])[sp] |
| | .[moe](T)[sp].[moe](T)[sp].[lna]([m5C])[sp].[lna](A)[sp].[lna](T)[sp].[lna] |
| | ([m5C])}$$$$V2.0 |
| 1018 | RNA1{[lna](G)[sp].[lna](T)[sp].[lna](T)[sp].[lna]([m5C])[sp].[lna](T)[sp]. |
| | [moe](T)[sp].[moe](G)[sp].[moe](T)[sp].[moe](A)[sp].[moe]([m5C])[sp].[ |
| | moe](T)[sp].[lna](T)[sp].[lna]([m5C])[sp].[lna](A)[sp].[lna](T)[sp].[lna]([ |
| | m5C])}$$$$V2.0 |
| 1019 | RNA1{[moe](G)[sp].[moe](T)[sp].[moe](T)[sp].[moe]([m5C])[sp].[moe]( |
| | T)[sp].[moe](T)[sp].[moe](G)[sp].[moe](T)[sp].[moe](A)[sp].[moe]([m5C |
| | ])[sp].[moe](T)[sp].[moe](T)[sp].[moe]([m5C])[sp].[moe](A)[sp].[moe](T |
| | )[sp].[lna]([m5C])}$$$$V2.0 |
| 1020 | RNA1{[moe](G)[sp].[moe](T)[sp].[moe](T)[sp].[moe]([m5C])[sp].[moe]( |
| | T)[sp].[moe](T)[sp].[moe](G)[sp].[moe](T)[sp].[moe](A)[sp].[moe]([m5C |
| | ])[sp].[moe](T)[sp].[moe](T)[sp].[moe]([m5C])[sp].[moe](A)[sp].[lna](T)[ |
| | sp].[lna]([m5C])}$$$$V2.0 |
| 1021 | RNA1{[moe](G)[sp].[moe](T)[sp].[moe](T)[sp].[moe]([m5C])[sp].[moe]( |
| | T)[sp].[moe](T)[sp].[moe](G)[sp].[moe](T)[sp].[moe](A)[sp].[moe]([m5C |
| | ])[sp].[moe](T)[sp].[moe](T)[sp].[moe]([m5C])[sp].[lna](A)[sp].[lna](T)[s |
| | p].[lna]([m5C])}$$$$V2.0 |
| 1022 | RNA1{[lna](T)[sp].[lna](G)[sp].[lna](T)[sp].[moe](T)[sp].[moe]([m5C])[s |
| | p].[moe](T)[sp].[moe](T)[sp].[moe](G)[sp].[moe](T)[sp].[moe](A)[sp].[m |
| | oe]([m5C])[sp].[moe](T)[sp].[moe](T)[sp].[lna]([m5C])[sp].[lna](A)[sp].[l |
| | na](T)}$$$$V2.0 |
| 1023 | RNA1{[lna](T)[sp].[moe](G)[sp].[moe](T)[sp].[moe](T)[sp].[moe]([m5C] |
| | )[sp].[moe](T)[sp].[moe](T)[sp].[moe](G)[sp].[moe](T)[sp].[moe](A)[sp].[ |
| | moe]([m5C])[sp].[moe](T)[sp].[moe](T)[sp].[moe]([m5C])[sp].[moe](A)[s |
| | p].[moe](T)}$$$$V2.0 |
| 1024 | RNA1{[lna](T)[sp].[lna](G)[sp].[moe](T)[sp].[moe](T)[sp].[moe]([m5C])[ |
| | sp].[moe](T)[sp].[moe](T)[sp].[moe](G)[sp].[moe](T)[sp].[moe](A)[sp].[ |
| | moe]([m5C])[sp].[moe](T)[sp].[moe](T)[sp].[moe]([m5C])[sp].[moe](A)[s |
| | p].[moe](T)}$$$$V2.0 |
| 1025 | RNA1{[lna](T)[sp].[lna](G)[sp].[lna](T)[sp].[moe](T)[sp].[moe]([m5C])[s |
| | p].[moe](T)[sp].[moe](T)[sp].[moe](G)[sp].[moe](T)[sp].[moe](A)[sp].[m |
| | oe]([m5C])[sp].[moe](T)[sp].[moe](T)[sp].[moe]([m5C])[sp].[moe](A)[sp] |
| | .[moe](T)}$$$$V2.0 |
| 1026 | RNA1{[lna](T)[sp].[lna](G)[sp].[lna](T)[sp].[moe](T)[sp].[moe]([m5C])[s |
| | p].[moe](T)[sp].[moe](T)[sp].[moe](G)[sp].[moe](T)[sp].[moe](A)[sp].[m |
| | oe]([m5C])[sp].[moe](T)[sp].[moe](T)[sp].[moe]([m5C])[sp].[moe](A)[sp] |
| | .[lna](T)}$$$$V2.0 |
| 1027 | RNA1{[lna](T)[sp].[lna](G)[sp].[lna](T)[sp].[moe](T)[sp].[moe]([m5C])[s |
| | p].[moe](T)[sp].[moe](T)[sp].[moe](G)[sp].[moe](T)[sp].[moe](A)[sp].[m |
| | oe]([m5C])[sp].[moe](T)[sp].[moe](T)[sp].[moe]([m5C])[sp].[lna](A)[sp]. |
| | [lna](T)}$$$$V2.0 |
| 1028 | RNA1{[lna](T)[sp].[lna](G)[sp].[lna](T)[sp].[lna](T)[sp].[moe]([m5C])[sp |
| | ].[moe](T)[sp].[moe](T)[sp].[moe](G)[sp].[moe](T)[sp].[moe](A)[sp].[mo |
| | e]([m5C])[sp].[moe](T)[sp].[moe](T)[sp].[moe]([m5C])[sp].[lna](A)[sp].[l |
| | na](T)}$$$$V2.0 |
| 1029 | RNA1{[lna](T)[sp].[moe](G)[sp].[moe](T)[sp].[moe](T)[sp].[moe]([m5C] |
| | )[sp].[moe](T)[sp].[moe](T)[sp].[moe](G)[sp].[moe](T)[sp].[moe](A)[sp].[ |
| | moe]([m5C])[sp].[moe](T)[sp].[moe](T)[sp].[lna]([m5C])[sp].[lna](A)[sp] |
| | .[lna](T)}$$$$V2.0 |
| 1030 | RNA1{[lna](T)[sp].[lna](G)[sp].[moe](T)[sp].[moe](T)[sp].[moe]([m5C])[ |
| | sp].[moe](T)[sp].[moe](T)[sp].[moe](G)[sp].[moe](T)[sp].[moe](A)[sp].[ |
| | moe]([m5C])[sp].[moe](T)[sp].[moe](T)[sp].[lna]([m5C])[sp].[lna](A)[sp] |
| | .[lna](T)}$$$$V2.0 |
| 1031 | RNA1{[lna](T)[sp].[lna](G)[sp].[lna](T)[sp].[lna](T)[sp].[moe]([m5C])[sp |
| | ].[moe](T)[sp].[moe](T)[sp].[moe](G)[sp].[moe](T)[sp].[moe](A)[sp].[mo |
| | e]([m5C])[sp].[moe](T)[sp].[moe](T)[sp].[lna]([m5C])[sp].[lna](A)[sp].[ln |
| | a](T)}$$$$V2.0 |
| 1032 | RNA1{[lna](T)[sp].[lna](G)[sp].[moe](T)[sp].[moe](T)[sp].[moe]([m5C])[ |
| | sp].[moe](T)[sp].[moe](T)[sp].[moe](G)[sp].[moe](T)[sp].[moe](A)[sp].[ |
| | moe]([m5C])[sp].[moe](T)[sp].[lna](T)[sp].[lna]([m5C])[sp].[lna](A)[sp].[ |
| | lna](T)}$$$$V2.0 |
| 1033 | RNA1{[lna](T)[sp].[lna](G)[sp].[lna](T)[sp].[moe](T)[sp].[moe]([m5C])[s |
| | p].[moe](T)[sp].[moe](T)[sp].[moe](G)[sp].[moe](T)[sp].[moe](A)[sp].[m |
| | oe]([m5C])[sp].[moe](T)[sp].[lna](T)[sp].[lna]([m5C])[sp].[lna](A)[sp].[ln |
| | a](T)}$$$$V2.0 |
| 1034 | RNA1{[lna](T)[sp].[lna](G)[sp].[lna](T)[sp].[lna](T)[sp].[moe]([m5C])[sp |
| | ].[moe](T)[sp].[moe](T)[sp].[moe](G)[sp].[moe](T)[sp].[moe](A)[sp].[mo |
| | e]([m5C])[sp].[moe](T)[sp].[lna](T)[sp].[lna]([m5C])[sp].[lna](A)[sp].[lna |
| | ](T)}$$$$V2.0 |
| 1035 | RNA1{[lna](T)[sp].[lna](G)[sp].[lna](T)[sp].[lna](T)[sp].[lna]([m5C])[sp]. |
| | [moe](T)[sp].[moe](T)[sp].[moe](G)[sp].[moe](T)[sp].[moe](A)[sp].[moe] |
| | ([m5C])[sp].[lna](T)[sp].[lna](T)[sp].[lna]([m5C])[sp].[lna](A)[sp].[lna](T |
| | )}$$$$V2.0 |
| 1036 | RNA1{[moe](T)[sp].[moe](G)[sp].[moe](T)[sp].[moe](T)[sp].[moe]([m5C |
| | ])[sp].[moe](T)[sp].[moe](T)[sp].[moe](G)[sp].[moe](T)[sp].[moe](A)[sp]. |
| | [moe]([m5C])[sp].[moe](T)[sp].[moe](T)[sp].[moe]([m5C])[sp].[moe](A)[ |
| | sp].[lna](T)}$$$$V2.0 |
| 1037 | RNA1{[moe](T)[sp].[moe](G)[sp].[moe](T)[sp].[moe](T)[sp].[moe]([m5C |
| | ])[sp].[moe](T)[sp].[moe](T)[sp].[moe](G)[sp].[moe](T)[sp].[moe](A)[sp]. |
| | [moe]([m5C])[sp].[moe](T)[sp].[moe](T)[sp].[moe]([m5C])[sp].[lna](A)[s |
| | p].[lna](T)}$$$$V2.0 |
| 1038 | RNA1{[moe](T)[sp].[moe](G)[sp].[moe](T)[sp].[moe](T)[sp].[moe]([m5C |
| | ])[sp].[moe](T)[sp].[moe](T)[sp].[moe](G)[sp].[moe](T)[sp].[moe](A)[sp]. |
| | [moe]([m5C])[sp].[moe](T)[sp].[moe](T)[sp].[lna]([m5C])[sp].[lna](A)[sp |
| | ].[lna](T)}$$$$V2.0 |
| 1039 | RNA1{[lna](G)[sp].[lna](T)[sp].[lna](G)[sp].[moe](T)[sp].[moe](T)[sp].[ |
| | moe]([m5C])[sp].[moe](T)[sp].[moe](T)[sp].[moe](G)[sp].[moe](T)[sp].[ |
| | moe](A)[sp].[moe]([m5C])[sp].[moe](T)[sp].[lna](T)[sp].[lna]([m5C])[sp] |
| | .[lna](A)}$$$$V2.0 |
| 1040 | RNA1{[lna](G)[sp].[moe](T)[sp].[moe](G)[sp].[moe](T)[sp].[moe](T)[sp] |
| | .[moe]([m5C])[sp].[moe](T)[sp].[moe](T)[sp].[moe](G)[sp].[moe](T)[sp].[ |
| | moe](A)[sp].[moe]([m5C])[sp].[moe](T)[sp].[moe](T)[sp].[moe]([m5C])[s |
| | p].[moe](A)}$$$$V2.0 |
| 1041 | RNA1{[lna](G)[sp].[lna](T)[sp].[moe](G)[sp].[moe](T)[sp].[moe](T)[sp].[ |
| | moe]([m5C])[sp].[moe](T)[sp].[moe](T)[sp].[moe](G)[sp].[moe](T)[sp].[ |
| | moe](A)[sp].[moe]([m5C])[sp].[moe](T)[sp].[moe](T)[sp].[moe]([m5C])[s |
| | p].[moe](A)}$$$$V2.0 |
| 1042 | RNA1{[lna](G)[sp].[lna](T)[sp].[lna](G)[sp].[moe](T)[sp].[moe](T)[sp].[ |
| | moe]([m5C])[sp].[moe](T)[sp].[moe](T)[sp].[moe](G)[sp].[moe](T)[sp].[ |
| | moe](A)[sp].[moe]([m5C])[sp].[moe](T)[sp].[moe](T)[sp].[moe]([m5C])[s |
| | p].[moe](A)}$$$$V2.0 |
| 1043 | RNA1{[lna](G)[sp].[lna](T)[sp].[moe](G)[sp].[moe](T)[sp].[moe](T)[sp].[ |
| | moe]([m5C])[sp].[moe](T)[sp].[moe](T)[sp].[moe](G)[sp].[moe](T)[sp].[ |
| | moe](A)[sp].[moe]([m5C])[sp].[moe](T)[sp].[moe](T)[sp].[moe]([m5C])[s |
| | p].[lna](A)}$$$$V2.0 |
| 1044 | RNA1{[lna](G)[sp].[lna](T)[sp].[lna](G)[sp].[moe](T)[sp].[moe](T)[sp].[ |
| | moe]([m5C])[sp].[moe](T)[sp].[moe](T)[sp].[moe](G)[sp].[moe](T)[sp].[ |
| | moe](A)[sp].[moe]([m5C])[sp].[moe](T)[sp].[moe](T)[sp].[moe]([m5C])[s |
| | p].[lna](A)}$$$$V2.0 |
| 1045 | RNA1{[lna](G)[sp].[moe](T)[sp].[moe](G)[sp].[moe](T)[sp].[moe](T)[sp] |
| | .[moe]([m5C])[sp].[moe](T)[sp].[moe](T)[sp].[moe](G)[sp].[moe](T)[sp].[ |
| | moe](A)[sp].[moe]([m5C])[sp].[moe](T)[sp].[moe](T)[sp].[lna]([m5C])[sp |
| | ].[lna](A)}$$$$V2.0 |
| 1046 | RNA1{[lna](G)[sp].[lna](T)[sp].[lna](G)[sp].[moe](T)[sp].[moe](T)[sp].[ |
| | moe]([m5C])[sp].[moe](T)[sp].[moe](T)[sp].[moe](G)[sp].[moe](T)[sp].[ |
| | moe](A)[sp].[moe]([m5C])[sp].[moe](T)[sp].[moe](T)[sp].[lna]([m5C])[sp |
| | ].[lna](A)}$$$$V2.0 |
| 1047 | RNA1{[lna](G)[sp].[lna](T)[sp].[lna](G)[sp].[lna](T)[sp].[moe](T)[sp].[m |
| | oe]([m5C])[sp].[moe](T)[sp].[moe](T)[sp].[moe](G)[sp].[moe](T)[sp].[mo |
| | e](A)[sp].[moe]([m5C])[sp].[moe](T)[sp].[moe](T)[sp].[lna]([m5C])[sp].[l |
| | na](A)}$$$$V2.0 |
| 1048 | RNA1{[lna](G)[sp].[moe](T)[sp].[moe](G)[sp].[moe](T)[sp].[moe](T)[sp] |
| | .[moe]([m5C])[sp].[moe](T)[sp].[moe](T)[sp].[moe](G)[sp].[moe](T)[sp].[ |
| | moe](A)[sp].[moe]([m5C])[sp].[moe](T)[sp].[lna](T)[sp].[lna]([m5C])[sp] |
| | .[lna](A)}$$$$V2.0 |
| 1049 | RNA1{[lna](G)[sp].[lna](T)[sp].[moe](G)[sp].[moe](T)[sp].[moe](T)[sp].[ |
| | moe]([m5C])[sp].[moe](T)[sp].[moe](T)[sp].[moe](G)[sp].[moe](T)[sp].[ |
| | moe](A)[sp].[moe]([m5C])[sp].[moe](T)[sp].[lna](T)[sp].[lna]([m5C])[sp] |
| | .[lna](A)}$$$$V2.0 |
| 1050 | RNA1{[lna](G)[sp].[lna](T)[sp].[lna](G)[sp].[lna](T)[sp].[moe](T)[sp].[m |
| | oe]([m5C])[sp].[moe](T)[sp].[moe](T)[sp].[moe](G)[sp].[moe](T)[sp].[mo |
| | e](A)[sp].[moe]([m5C])[sp].[moe](T)[sp].[lna](T)[sp].[lna]([m5C])[sp].[ln |
| | a](A)}$$$$V2.0 |
| 1051 | RNA1{[lna](G)[sp].[lna](T)[sp].[moe](G)[sp].[moe](T)[sp].[moe](T)[sp].[ |
| | moe]([m5C])[sp].[moe](T)[sp].[moe](T)[sp].[moe](G)[sp].[moe](T)[sp].[ |
| | moe](A)[sp].[moe]([m5C])[sp].[lna](T)[sp].[lna](T)[sp].[lna]([m5C])[sp].[ |
| | lna](A)}$$$$V2.0 |
| 1052 | RNA1{[lna](G)[sp].[lna](T)[sp].[lna](G)[sp].[moe](T)[sp].[moe](T)[sp].[ |
| | moe]([m5C])[sp].[moe](T)[sp].[moe](T)[sp].[moe](G)[sp].[moe](T)[sp].[ |
| | moe](A)[sp].[moe]([m5C])[sp].[lna](T)[sp].[lna](T)[sp].[lna]([m5C])[sp].[ |
| | lna](A)}$$$$V2.0 |
| 1053 | RNA1{[lna](G)[sp].[lna](T)[sp].[lna](G)[sp].[lna](T)[sp].[moe](T)[sp].[m |
| | oe]([m5C])[sp].[moe](T)[sp].[moe](T)[sp].[moe](G)[sp].[moe](T)[sp].[mo |
| | e](A)[sp].[moe]([m5C])[sp].[lna](T)[sp].[lna](T)[sp].[lna]([m5C])[sp].[lna |
| | ](A)}$$$$V2.0 |
| 1054 | RNA1{[lna](G)[sp].[lna](T)[sp].[lna](G)[sp].[lna](T)[sp].[lna](T)[sp].[mo |
| | e]([m5C])[sp].[moe](T)[sp].[moe](T)[sp].[moe](G)[sp].[moe](T)[sp].[moe |
| | ](A)[sp].[lna]([m5C])[sp].[lna](T)[sp].[lna](T)[sp].[lna]([m5C])[sp].[lna]( |
| | A)}$$$$V2.0 |
| 1055 | RNA1{[moe](G)[sp].[moe](T)[sp].[moe](G)[sp].[moe](T)[sp].[moe](T)[sp |
| | ].[moe]([m5C])[sp].[moe](T)[sp].[moe](T)[sp].[moe](G)[sp].[moe](T)[sp]. |
| | [moe](A)[sp].[moe]([m5C])[sp].[moe](T)[sp].[moe](T)[sp].[moe]([m5C])[ |
| | sp].[lna](A)}$$$$V2.0 |
| 1056 | RNA1{[moe](G)[sp].[moe](T)[sp].[moe](G)[sp].[moe](T)[sp].[moe](T)[sp |
| | ].[moe]([m5C])[sp].[moe](T)[sp].[moe](T)[sp].[moe](G)[sp].[moe](T)[sp]. |
| | [moe](A)[sp].[moe]([m5C])[sp].[moe](T)[sp].[moe](T)[sp].[lna]([m5C])[s |
| | p].[lna](A)}$$$$V2.0 |
| 1057 | RNA1{[moe](G)[sp].[moe](T)[sp].[moe](G)[sp].[moe](T)[sp].[moe](T)[sp |
| | ].[moe]([m5C])[sp].[moe](T)[sp].[moe](T)[sp].[moe](G)[sp].[moe](T)[sp]. |
| | [moe](A)[sp].[moe]([m5C])[sp].[moe](T)[sp].[lna](T)[sp].[lna]([m5C])[sp |
| | ].[lna](A)}$$$$V2.0 |
| 1058 | RNA1{[lna](G)[sp].[lna](G)[sp].[lna](T)[sp].[moe](G)[sp].[moe](T)[sp].[ |
| | moe](T)[sp].[moe]([m5C])[sp].[moe](T)[sp].[moe](T)[sp].[moe](G)[sp].[ |
| | moe](T)[sp].[moe](A)[sp].[moe]([m5C])[sp].[lna](T)[sp].[lna](T)[sp].[lna] |
| | ([m5C])}$$$$V2.0 |
| 1059 | RNA1{[lna](G)[sp].[moe](G)[sp].[moe](T)[sp].[moe](G)[sp].[moe](T)[sp] |
| | .[moe](T)[sp].[moe]([m5C])[sp].[moe](T)[sp].[moe](T)[sp].[moe](G)[sp].[ |
| | moe](T)[sp].[moe](A)[sp].[moe]([m5C])[sp].[moe](T)[sp].[moe](T)[sp].[ |
| | moe]([m5C])}$$$$V2.0 |
| 1060 | RNA1{[lna](G)[sp].[lna](G)[sp].[moe](T)[sp].[moe](G)[sp].[moe](T)[sp].[ |
| | moe](T)[sp].[moe]([m5C])[sp].[moe](T)[sp].[moe](T)[sp].[moe](G)[sp].[ |
| | moe](T)[sp].[moe](A)[sp].[moe]([m5C])[sp].[moe](T)[sp].[moe](T)[sp].[ |
| | moe]([m5C])}$$$$V2.0 |
| 1061 | RNA1{[lna](G)[sp].[lna](G)[sp].[lna](T)[sp].[moe](G)[sp].[moe](T)[sp].[ |
| | moe](T)[sp].[moe]([m5C])[sp].[moe](T)[sp].[moe](T)[sp].[moe](G)[sp].[ |
| | moe](T)[sp].[moe](A)[sp].[moe]([m5C])[sp].[moe](T)[sp].[moe](T)[sp].[ |
| | moe]([m5C])}$$$$V2.0 |
| 1062 | RNA1{[lna](G)[sp].[moe](G)[sp].[moe](T)[sp].[moe](G)[sp].[moe](T)[sp] |
| | .[moe](T)[sp].[moe]([m5C])[sp].[moe](T)[sp].[moe](T)[sp].[moe](G)[sp].[ |
| | moe](T)[sp].[moe](A)[sp].[moe]([m5C])[sp].[moe](T)[sp].[moe](T)[sp].[] |
| | na]([m5C])}$$$$V2.0 |
| 1063 | RNA1{[lna](G)[sp].[lna](G)[sp].[moe](T)[sp].[moe](G)[sp].[moe](T)[sp].[ |
| | moe](T)[sp].[moe]([m5C])[sp].[moe](T)[sp].[moe](T)[sp].[moe](G)[sp].[ |
| | moe](T)[sp].[moe](A)[sp].[moe]([m5C])[sp].[moe](T)[sp].[moe](T)[sp].[] |
| | na]([m5C])}$$$$V2.0 |
| 1064 | RNA1{[lna](G)[sp].[lna](G)[sp].[lna](T)[sp].[moe](G)[sp].[moe](T)[sp].[ |
| | moe](T)[sp].[moe]([m5C])[sp].[moe](T)[sp].[moe](T)[sp].[moe](G)[sp].[ |
| | moe](T)[sp].[moe](A)[sp].[moe]([m5C])[sp].[moe](T)[sp].[moe](T)[sp].[] |
| | na]([m5C])}$$$$V2.0 |
| 1065 | RNA1{[lna](G)[sp].[moe](G)[sp].[moe](T)[sp].[moe](G)[sp].[moe](T)[sp] |
| | .[moe](T)[sp].[moe]([m5C])[sp].[moe](T)[sp].[moe](T)[sp].[moe](G)[sp].[ |
| | moe](T)[sp].[moe](A)[sp].[moe]([m5C])[sp].[moe](T)[sp].[lna](T)[sp].[ln |
| | a]([m5C])}$$$$V2.0 |
| 1066 | RNA1{[lna](G)[sp].[lna](G)[sp].[lna](T)[sp].[moe](G)[sp].[moe](T)[sp].[ |
| | moe](T)[sp].[moe]([m5C])[sp].[moe](T)[sp].[moe](T)[sp].[moe](G)[sp].[ |
| | moe](T)[sp].[moe](A)[sp].[moe]([m5C])[sp].[moe](T)[sp].[lna](T)[sp].[ln |
| | a]([m5C])}$$$$V2.0 |
| 1067 | RNA1{[lna](G)[sp].[lna](G)[sp].[lna](T)[sp].[lna](G)[sp].[moe](T)[sp].[m |
| | oe](T)[sp].[moe]([m5C])[sp].[moe](T)[sp].[moe](T)[sp].[moe](G)[sp].[mo |
| | e](T)[sp].[moe](A)[sp].[moe]([m5C])[sp].[moe](T)[sp].[lna](T)[sp].[lna]([ |
| | m5C])}$$$$V2.0 |
| 1068 | RNA1{[lna](G)[sp].[moe](G)[sp].[moe](T)[sp].[moe](G)[sp].[moe](T)[sp] |
| | .[moe](T)[sp].[moe]([m5C])[sp].[moe](T)[sp].[moe](T)[sp].[moe](G)[sp].[ |
| | moe](T)[sp].[moe](A)[sp].[moe]([m5C])[sp].[lna](T)[sp].[lna](T)[sp].[lna] |
| | ([m5C])}$$$$V2.0 |
| 1069 | RNA1{[lna](G)[sp].[lna](G)[sp].[moe](T)[sp].[moe](G)[sp].[moe](T)[sp].[ |
| | moe](T)[sp].[moe]([m5C])[sp].[moe](T)[sp].[moe](T)[sp].[moe](G)[sp].[ |
| | moe](T)[sp].[moe](A)[sp].[moe]([m5C])[sp].[lna](T)[sp].[lna](T)[sp].[lna] |
| | ([m5C])}$$$$V2.0 |
| 1070 | RNA1{[lna](G)[sp].[lna](G)[sp].[lna](T)[sp].[lna](G)[sp].[moe](T)[sp].[m |
| | oe](T)[sp].[moe]([m5C])[sp].[moe](T)[sp].[moe](T)[sp].[moe](G)[sp].[mo |
| | e](T)[sp].[moe](A)[sp].[moe]([m5C])[sp].[lna](T)[sp].[lna](T)[sp].[lna]([ |
| | m5C])}$$$$V2.0 |
| 1071 | RNA1{[lna](G)[sp].[lna](G)[sp].[moe](T)[sp].[moe](G)[sp].[moe](T)[sp].[ |
| | moe](T)[sp].[moe]([m5C])[sp].[moe](T)[sp].[moe](T)[sp].[moe](G)[sp].[ |
| | moe](T)[sp].[moe](A)[sp].[lna]([m5C])[sp].[lna](T)[sp].[lna](T)[sp].[lna]( |
| | [m5C])}$$$$V2.0 |
| 1072 | RNA1{[lna](G)[sp].[lna](G)[sp].[lna](T)[sp].[moe](G)[sp].[moe](T)[sp].[ |
| | moe](T)[sp].[moe]([m5C])[sp].[moe](T)[sp].[moe](T)[sp].[moe](G)[sp].[ |
| | moe](T)[sp].[moe](A)[sp].[lna]([m5C])[sp].[lna](T)[sp].[lna](T)[sp].[lna]( |
| | [m5C])}$$$$V2.0 |
| 1073 | RNA1{[lna](G)[sp].[lna](G)[sp].[lna](T)[sp].[lna](G)[sp].[moe](T)[sp].[m |
| | oe](T)[sp].[moe]([m5C])[sp].[moe](T)[sp].[moe](T)[sp].[moe](G)[sp].[mo |
| | e](T)[sp].[moe](A)[sp].[lna]([m5C])[sp].[lna](T)[sp].[lna](T)[sp].[lna]([m |
| | 5C])}$$$$V2.0 |
| 1074 | RNA1{[lna](G)[sp].[lna](G)[sp].[lna](T)[sp].[lna](G)[sp].[lna](T)[sp].[mo |
| | e](T)[sp].[moe]([m5C])[sp].[moe](T)[sp].[moe](T)[sp].[moe](G)[sp].[moe |
| | ](T)[sp].[lna](A)[sp].[lna]([m5C])[sp].[lna](T)[sp].[lna](T)[sp].[lna]([m5C |
| | ])}$$$$V2.0 |
| 1075 | RNA1{[moe](G)[sp].[moe](G)[sp].[moe](T)[sp].[moe](G)[sp].[moe](T)[s |
| | p].[moe](T)[sp].[moe]([m5C])[sp].[moe](T)[sp].[moe](T)[sp].[moe](G)[sp |
| | ].[moe](T)[sp].[moe](A)[sp].[moe]([m5C])[sp].[moe](T)[sp].[moe](T)[sp]. |
| | [lna]([m5C])}$$$$V2.0 |
| 1076 | RNA1{[moe](G)[sp].[moe](G)[sp].[moe](T)[sp].[moe](G)[sp].[moe](T)[s |
| | p].[moe](T)[sp].[moe]([m5C])[sp].[moe](T)[sp].[moe](T)[sp].[moe](G)[sp |
| | ].[moe](T)[sp].[moe](A)[sp].[moe]([m5C])[sp].[moe](T)[sp].[lna](T)[sp].[ |
| | lna]([m5C])}$$$$V2.0 |
| 1077 | RNA1{[moe](G)[sp].[moe](G)[sp].[moe](T)[sp].[moe](G)[sp].[moe](T)[s |
| | p].[moe](T)[sp].[moe]([m5C])[sp].[moe](T)[sp].[moe](T)[sp].[moe](G)[sp |
| | ].[moe](T)[sp].[moe](A)[sp].[moe]([m5C])[sp].[lna](T)[sp].[lna](T)[sp].[l |
| | na]([m5C])}$$$$V2.0 |
| 1078 | RNA1{[lna](G)[sp].[lna](T)[sp].[moe](T)[sp].[moe]([m5C])[sp].[moe](T)[ |
| | sp].[moe](T)[sp].[moe](G)[sp].[moe](T)[sp].[moe](A)[sp].[moe]([m5C])[s |
| | p].[moe](T)[sp].[moe](T)[sp].[lna]([m5C])[sp].[moe](A)[sp].[lna](T)}$$$ |
| | $V2.0 |
| 1079 | RNA1{[lna](G)[sp].[moe](T)[sp].[moe](T)[sp].[moe]([m5C])[sp].[moe](T |
| | )[sp].[moe](T)[sp].[moe](G)[sp].[moe](T)[sp].[moe](A)[sp].[moe]([m5C]) |
| | [sp].[moe](T)[sp].[moe](T)[sp].[lna]([m5C])[sp].[moe](A)[sp].[lna](T)}$$ |
| | $$V2.0 |
| 1080 | RNA1{[moe](G)[sp].[lna](T)[sp].[moe](T)[sp].[moe]([m5C])[sp].[moe](T |
| | )[sp].[moe](T)[sp].[moe](G)[sp].[moe](T)[sp].[moe](A)[sp].[moe]([m5C]) |
| | [sp].[moe](T)[sp].[moe](T)[sp].[lna]([m5C])[sp].[moe](A)[sp].[lna](T)}$$ |
| | $$V2.0 |
| 1081 | RNA1{[lna](G)[sp].[lna](T)[sp].[moe](T)[sp].[moe]([m5C])[sp].[moe](T)[ |
| | sp].[moe](T)[sp].[moe](G)[sp].[moe](T)[sp].[moe](A)[sp].[moe]([m5C])[s |
| | p].[moe](T)[sp].[moe](T)[sp].[lna]([m5C])[sp].[lna](A)[sp].[moe](T)}$$$ |
| | $V2.0 |
| 1082 | RNA1{[lna](G)[sp].[moe](T)[sp].[moe](T)[sp].[moe]([m5C])[sp].[moe](T |
| | )[sp].[moe](T)[sp].[moe](G)[sp].[moe](T)[sp].[moe](A)[sp].[moe]([m5C]) |
| | [sp].[moe](T)[sp].[moe](T)[sp].[lna]([m5C])[sp].[lna](A)[sp].[moe](T)}$$ |
| | $$V2.0 |
| 1083 | RNA1{[moe](G)[sp].[lna](T)[sp].[moe](T)[sp].[moe]([m5C])[sp].[moe](T |
| | )[sp].[moe](T)[sp].[moe](G)[sp].[moe](T)[sp].[moe](A)[sp].[moe]([m5C]) |
| | [sp].[moe](T)[sp].[moe](T)[sp].[lna]([m5C])[sp].[lna](A)[sp].[moe](T)}$$ |
| | $$V2.0 |
| 1084 | RNA1{[moe](G)[sp].[lna](T)[sp].[moe](T)[sp].[moe]([m5C])[sp].[moe](T |
| | )[sp].[moe](T)[sp].[moe](G)[sp].[moe](T)[sp].[moe](A)[sp].[moe]([m5C]) |
| | [sp].[moe](T)[sp].[moe](T)[sp].[moe]([m5C])[sp].[lna](A)[sp].[lna](T)}$$ |
| | $$V2.0 |
| 1085 | RNA1{[lna](G)[sp].[lna](T)[sp].[moe](T)[sp].[lna]([m5C])[sp].[moe](T)[s |
| | p].[moe](T)[sp].[moe](G)[sp].[moe](T)[sp].[moe](A)[sp].[moe]([m5C])[sp |
| | ].[moe](T)[sp].[moe](T)[sp].[lna]([m5C])[sp].[lna](A)[sp].[lna](T)}$$$$V |
| | 2.0 |
| 1086 | RNA1{[lna](G)[sp].[lna](T)[sp].[moe](T)[sp].[moe]([m5C])[sp].[lna](T)[s |
| | p].[moe](T)[sp].[moe](G)[sp].[moe](T)[sp].[moe](A)[sp].[moe]([m5C])[sp |
| | ].[moe](T)[sp].[moe](T)[sp].[lna]([m5C])[sp].[lna](A)[sp].[lna](T)}$$$$V |
| | 2.0 |
| 1087 | RNA1{[lna](G)[sp].[lna](T)[sp].[moe](T)[sp].[moe]([m5C])[sp].[moe](T)[ |
| | sp].[lna](T)[sp].[moe](G)[sp].[moe](T)[sp].[moe](A)[sp].[moe]([m5C])[sp |
| | ].[moe](T)[sp].[moe](T)[sp].[lna]([m5C])[sp].[lna](A)[sp].[lna](T)}$$$$V |
| | 2.0 |
| 1088 | RNA1{[lna](G)[sp].[lna](T)[sp].[moe](T)[sp].[moe]([m5C])[sp].[moe](T)[ |
| | sp].[moe](T)[sp].[lna](G)[sp].[moe](T)[sp].[moe](A)[sp].[moe]([m5C])[sp |
| | ].[moe](T)[sp].[moe](T)[sp].[lna]([m5C])[sp].[lna](A)[sp].[lna](T)}$$$$V |
| | 2.0 |
| 1089 | RNA1{[lna](G)[sp].[lna](T)[sp].[moe](T)[sp].[moe]([m5C])[sp].[moe](T)[ |
| | sp].[moe](T)[sp].[moe](G)[sp].[lna](T)[sp].[moe](A)[sp].[moe]([m5C])[sp |
| | ].[moe](T)[sp].[moe](T)[sp].[lna]([m5C])[sp].[lna](A)[sp].[lna](T)}$$$$V |
| | 2.0 |
| 1090 | RNA1{[lna](G)[sp].[lna](T)[sp].[moe](T)[sp].[moe]([m5C])[sp].[moe](T)[ |
| | sp].[moe](T)[sp].[moe](G)[sp].[moe](T)[sp].[lna](A)[sp].[moe]([m5C])[sp |
| | ].[moe](T)[sp].[moe](T)[sp].[lna]([m5C])[sp].[lna](A)[sp].[lna](T)}$$$$V |
| | 2.0 |
| 1091 | RNA1{[lna](G)[sp].[lna](T)[sp].[moe](T)[sp].[moe]([m5C])[sp].[moe](T)[ |
| | sp].[moe](T)[sp].[moe](G)[sp].[moe](T)[sp].[moe](A)[sp].[lna]([m5C])[sp |
| | ].[moe](T)[sp].[moe](T)[sp].[lna]([m5C])[sp].[lna](A)[sp].[lna](T)}$$$$V |
| | 2.0 |
| 1092 | RNA1{[lna](G)[sp].[lna](T)[sp].[moe](T)[sp].[moe]([m5C])[sp].[moe](T)[ |
| | sp].[moe](T)[sp].[moe](G)[sp].[moe](T)[sp].[moe](A)[sp].[moe]([m5C])[s |
| | p].[lna](T)[sp].[moe](T)[sp].[lna]([m5C])[sp].[lna](A)[sp].[lna](T)}$$$$V |
| | 2.0 |
| 1093 | RNA1{[lna](G)[sp].[lna](T)[sp].[moe](T)[sp].[moe]([m5C])[sp].[moe](T)[ |
| | sp].[moe](T)[sp].[moe](G)[sp].[moe](T)[sp].[moe](A)[sp].[moe]([m5C])[s |
| | p].[moe](T)[sp].[lna](T)[sp].[lna]([m5C])[sp].[lna](A)[sp].[lna](T)}$$$$V |
| | 2.0 |
| 1094 | RNA1{[lna](T)[sp].[moe](G)[sp].[moe](T)[sp].[moe](T)[sp].[moe]([m5C] |
| | )[sp].[moe](T)[sp].[moe](T)[sp].[moe](G)[sp].[moe](T)[sp].[moe](A)[sp].[ |
| | moe]([m5C])[sp].[moe](T)[sp].[moe](T)[sp].[moe]([m5C])[sp].[lna](A)[sp |
| | ].[moe](T)}$$$$V2.0 |
| 1095 | RNA1{[moe](T)[sp].[moe](G)[sp].[moe](T)[sp].[moe](T)[sp].[moe]([m5C |
| | ])[sp].[moe](T)[sp].[moe](T)[sp].[moe](G)[sp].[moe](T)[sp].[moe](A)[sp]. |
| | [moe]([m5C])[sp].[moe](T)[sp].[moe](T)[sp].[moe]([m5C])[sp].[lna](A)[s |
| | p].[moe](T)}$$$$V2.0 |
| 1096 | RNA1{[lna](T)[sp].[moe](G)[sp].[lna](T)[sp].[moe](T)[sp].[moe]([m5C])[ |
| | sp].[moe](T)[sp].[moe](T)[sp].[moe](G)[sp].[moe](T)[sp].[moe](A)[sp].[ |
| | moe]([m5C])[sp].[moe](T)[sp].[moe](T)[sp].[moe]([m5C])[sp].[lna](A)[sp |
| | ].[lna](T)}$$$$V2.0 |
| 1097 | RNA1{[lna](T)[sp].[moe](G)[sp].[moe](T)[sp].[lna](T)[sp].[moe]([m5C])[ |
| | sp].[moe](T)[sp].[moe](T)[sp].[moe](G)[sp].[moe](T)[sp].[moe](A)[sp].[ |
| | moe]([m5C])[sp].[moe](T)[sp].[moe](T)[sp].[moe]([m5C])[sp].[lna](A)[sp |
| | ].[lna](T)}$$$$V2.0 |
| 1098 | RNA1{[lna](T)[sp].[moe](G)[sp].[moe](T)[sp].[moe](T)[sp].[lna]([m5C])[ |
| | sp].[moe](T)[sp].[moe](T)[sp].[moe](G)[sp].[moe](T)[sp].[moe](A)[sp].[ |
| | moe]([m5C])[sp].[moe](T)[sp].[moe](T)[sp].[moe]([m5C])[sp].[lna](A)[sp |
| | ].[lna](T)}$$$$V2.0 |
| 1099 | RNA1{[lna](T)[sp].[moe](G)[sp].[moe](T)[sp].[moe](T)[sp].[moe]([m5C] |
| | )[sp].[lna](T)[sp].[moe](T)[sp].[moe](G)[sp].[moe](T)[sp].[moe](A)[sp].[ |
| | moe]([m5C])[sp].[moe](T)[sp].[moe](T)[sp].[moe]([m5C])[sp].[lna](A)[sp |
| | ].[lna](T)}$$$$V2.0 |
| 1100 | RNA1{[lna](T)[sp].[moe](G)[sp].[moe](T)[sp].[moe](T)[sp].[moe]([m5C] |
| | )[sp].[moe](T)[sp].[lna](T)[sp].[moe](G)[sp].[moe](T)[sp].[moe](A)[sp].[ |
| | moe]([m5C])[sp].[moe](T)[sp].[moe](T)[sp].[moe]([m5C])[sp].[lna](A)[sp |
| | ].[lna](T)}$$$$V2.0 |
| 1101 | RNA1{[lna](T)[sp].[moe](G)[sp].[moe](T)[sp].[moe](T)[sp].[moe]([m5C] |
| | )[sp].[moe](T)[sp].[moe](T)[sp].[lna](G)[sp].[moe](T)[sp].[moe](A)[sp].[ |
| | moe]([m5C])[sp].[moe](T)[sp].[moe](T)[sp].[moe]([m5C])[sp].[lna](A)[sp |
| | ].[lna](T)}$$$$V2.0 |
| 1102 | RNA1{[lna](T)[sp].[moe](G)[sp].[moe](T)[sp].[moe](T)[sp].[moe]([m5C] |
| | )[sp].[moe](T)[sp].[moe](T)[sp].[moe](G)[sp].[lna](T)[sp].[moe](A)[sp].[ |
| | moe]([m5C])[sp].[moe](T)[sp].[moe](T)[sp].[moe]([m5C])[sp].[lna](A)[sp |
| | ].[lna](T)}$$$$V2.0 |
| 1103 | RNA1{[lna](T)[sp].[moe](G)[sp].[moe](T)[sp].[moe](T)[sp].[moe]([m5C] |
| | )[sp].[moe](T)[sp].[moe](T)[sp].[moe](G)[sp].[moe](T)[sp].[lna](A)[sp].[ |
| | moe]([m5C])[sp].[moe](T)[sp].[moe](T)[sp].[moe]([m5C])[sp].[lna](A)[sp |
| | ].[lna](T)}$$$$V2.0 |
| 1104 | RNA1{[lna](T)[sp].[moe](G)[sp].[moe](T)[sp].[moe](T)[sp].[moe]([m5C] |
| | )[sp].[moe](T)[sp].[moe](T)[sp].[moe](G)[sp].[moe](T)[sp].[moe](A)[sp].[ |
| | lna]([m5C])[sp].[moe](T)[sp].[moe](T)[sp].[moe]([m5C])[sp].[lna](A)[sp] |
| | [lna](T)}$$$$V2.0 |
| 1105 | RNA1{[lna](T)[sp].[moe](G)[sp].[moe](T)[sp].[moe](T)[sp].[moe]([m5C] |
| | )[sp].[moe](T)[sp].[moe](T)[sp].[moe](G)[sp].[moe](T)[sp].[moe](A)[sp].[ |
| | moe]([m5C])[sp].[lna](T)[sp].[moe](T)[sp].[moe]([m5C])[sp].[lna](A)[sp] |
| | .[lna](T)}$$$$V2.0 |
| 1106 | RNA1{[lna](T)[sp].[moe](G)[sp].[moe](T)[sp].[moe](T)[sp].[moe]([m5C] |
| | )[sp].[moe](T)[sp].[moe](T)[sp].[moe](G)[sp].[moe](T)[sp].[moe](A)[sp].[ |
| | moe]([m5C])[sp].[moe](T)[sp].[lna](T)[sp].[moe]([m5C])[sp].[lna](A)[sp] |
| | .[lna](T)}$$$$V2.0 |
| 1107 | RNA1{[lna]([m5C])[sp].[lna](T)[sp].[moe](G)[sp].[moe](A)[sp].[moe](A) |
| | [sp].[moe](T)[sp].[moe](T)[sp].[moe]([m5C])[sp].[moe](T)[sp].[moe](T)[s |
| | p].[moe](T)[sp].[moe]([m5C])[sp].[moe](A)[sp].[moe](A)[sp].[moe]([m5 |
| | C])[sp].[moe](T)[sp].[lna](A)[sp].[lna](G)}$$$$V2.0 |
| 1108 | RNA1{[moe](T)[sp].[moe]([m5C])[sp].[moe](T)[sp].[moe](G)[sp].[moe]( |
| | A)[sp].[moe](A)[sp].[moe](T)[sp].[moe](T)[sp].[moe]([m5C])[sp].[moe]( |
| | T)[sp].[moe](T)[sp].[moe](T)[sp].[moe]([m5C])[sp].[moe](A)[sp].[moe]( |
| | A)}$$$$V2.0 |
| 1109 | RNA1{[moe]([m5C])[sp].[moe](T)[sp].[moe](G)[sp].[moe](A)[sp].[moe]( |
| | A)[sp].[moe](T)[sp].[moe](T)[sp].[moe]([m5C])[sp].[moe](T)[sp].[moe](T |
| | )[sp].[moe](T)[sp].[moe]([m5C])[sp].[moe](A)[sp].[moe](A)[sp].[moe]([m |
| | 5C])}$$$$V2.0 |
| 1110 | RNA1{[moe](T)[sp].[moe](G)[sp].[moe](A)[sp].[moe](A)[sp].[moe](T)[s |
| | p].[moe](T)[sp].[moe]([m5C])[sp].[moe](T)[sp].[moe](T)[sp].[moe](T)[sp |
| | ].[moe]([m5C])[sp].[moe](A)[sp].[moe](A)[sp].[moe]([m5C])[sp].[moe](T |
| | )}$$$$V2.0 |
| 1111 | RNA1{[moe](A)[sp].[moe](A)[sp].[moe](T)[sp].[moe](T)[sp].[moe]([m5 |
| | C])[sp].[moe](T)[sp].[moe](T)[sp].[moe](T)[sp].[moe]([m5C])[sp].[moe]( |
| | A)[sp].[moe](A)[sp].[moe]([m5C])[sp].[moe](T)[sp].[moe](A)[sp].[moe]( |
| | G)}$$$$V2.0 |
| 1112 | RNA1{[moe](A)[sp].[moe](T)[sp].[moe](T)[sp].[moe]([m5C])[sp].[moe]( |
| | T)[sp].[moe](T)[sp].[moe](T)[sp].[moe]([m5C])[sp].[moe](A)[sp].[moe]( |
| | A)[sp].[moe]([m5C])[sp].[moe](T)[sp].[moe](A)[sp].[moe](G)[sp].[moe]( |
| | A)}$$$$V2.0 |
| 1113 | RNA1{[moe](T)[sp].[moe]([m5C])[sp].[moe](T)[sp].[moe](G)[sp].[moe]( |
| | A)[sp].[moe](A)[sp].[moe](T)[sp].[moe](T)[sp].[moe]([m5C])[sp].[moe]( |
| | T)[sp].[moe](T)[sp].[moe](T)[sp].[moe]([m5C])[sp].[moe](A)[sp].[moe]( |
| | A)[sp].[moe]([m5C])[sp].[moe](T)}$$$$V2.0 |
| 1114 | RNA1{[moe]([m5C])[sp].[moe](T)[sp].[moe](G)[sp].[moe](A)[sp].[moe]( |
| | A)[sp].[moe](T)[sp].[moe](T)[sp].[moe]([m5C])[sp].[moe](T)[sp].[moe](T |
| | )[sp].[moe](T)[sp].[moe]([m5C])[sp].[moe](A)[sp].[moe](A)[sp].[moe]([m |
| | 5C])[sp].[moe](T)[sp].[moe](A)}$$$$V2.0 |
| 1115 | RNA1{[moe](T)[sp].[moe](G)[sp].[moe](A)[sp].[moe](A)[sp].[moe](T)[s |
| | p].[moe](T)[sp].[moe]([m5C])[sp].[moe](T)[sp].[moe](T)[sp].[moe](T)[sp |
| | ].[moe]([m5C])[sp].[moe](A)[sp].[moe](A)[sp].[moe]([m5C])[sp].[moe](T |
| | )[sp].[moe](A)[sp].[moe](G)}$$$$V2.0 |
| 1116 | RNA1{[moe](G)[sp].[moe](A)[sp].[moe](A)[sp].[moe](T)[sp].[moe](T)[s |
| | p].[moe]([m5C])[sp].[moe](T)[sp].[moe](T)[sp].[moe](T)[sp].[moe]([m5C |
| | ])[sp].[moe](A)[sp].[moe](A)[sp].[moe]([m5C])[sp].[moe](T)[sp].[moe](A |
| | )[sp].[moe](G)[sp].[moe](A)}$$$$V2.0 |
| 1117 | RNA1{[moe](T)[sp].[moe]([m5C])[sp].[moe](T)[sp].[moe](G)[sp].[moe]( |
| | A)[sp].[moe](A)[sp].[moe](T)[sp].[moe](T)[sp].[moe]([m5C])[sp].[moe]( |
| | T)[sp].[moe](T)[sp].[moe](T)[sp].[moe]([m5C])[sp].[moe](A)[sp].[moe]( |
| | A)[sp].[moe]([m5C])[sp].[moe](T)[sp].[moe](A)[sp].[moe](G)[sp].[moe]( |
| | A)}$$$$V2.0 |
| 1118 | RNA1{[moe](T)[sp].[moe]([m5C])[sp].[moe](T)[sp].[moe](G)[sp].[moe]( |
| | A)[sp].[moe](A)[sp].[moe](T)[sp].[moe](T)[sp].[moe]([m5C])[sp].[moe]( |
| | T)[sp].[moe](T)[sp].[moe](T)[sp].[moe]([m5C])[sp].[moe](A)[sp].[moe]( |
| | A)[sp].[moe]([m5C])[sp].[moe](T)[sp].[moe](A)[sp].[moe](G)}$$$$V2.0 |
| 1119 | RNA1{[moe]([m5C])[sp].[moe](T)[sp].[moe](G)[sp].[moe](A)[sp].[moe]( |
| | A)[sp].[moe](T)[sp].[moe](T)[sp].[moe]([m5C])[sp].[moe](T)[sp].[moe](T |
| | )[sp].[moe](T)[sp].[moe]([m5C])[sp].[moe](A)[sp].[moe](A)[sp].[moe]([m |
| | 5C])[sp].[moe](T)[sp].[moe](A)[sp].[moe](G)[sp].[moe](A)}$$$$V2.0 |
| 1120 | RNA1{[moe]([m5C])[sp].[moe](T)[sp].[moe](G)[sp].[moe](A)[sp].[moe]( |
| | A)[sp].[moe](T)[sp].[moe](T)[sp].[moe]([m5C])[sp].[moe](T)[sp].[moe](T |
| | )[sp].[moe](T)[sp].[moe]([m5C])[sp].[moe](A)[sp].[moe](A)[sp].[moe]([m |
| | 5C])[sp].[moe](T)[sp].[moe](A)[sp].[moe](G)[sp].[moe](A)[sp].[moe](A)} |
| | $$$$V2.0 |
| 1121 | RNA1{[moe](T)[sp].[moe](T)[sp].[moe]([m5C])[sp].[moe](T)[sp].[moe]( |
| | G)[sp].[moe](A)[sp].[moe](A)[sp].[moe](T)[sp].[moe](T)[sp].[moe]([m5C |
| | ])[sp].[moe](T)[sp].[moe](T)[sp].[moe](T)[sp].[moe]([m5C])[sp].[moe](A |
| | )[sp].[moe](A)[sp].[moe]([m5C])[sp].[moe](T)[sp].[moe](A)[sp].[moe](G) |
| | }$$$$V2.0 |
| 1122 | RNA1{[lna](T)[sp].[moe](G)[sp].m(T)[sp].[moe](T)[sp].[moe]([m5C])[sp |
| | ].[moe](T)[sp].[moe](T)[sp].[moe](G)[sp].[moe](T)[sp].[moe](A)[sp].[mo |
| | e]([m5C])[sp].[moe](T)[sp].[moe](T)[sp].[moe]([m5C])[sp].[moe](A)[sp]. |
| | [moe](T)[sp].[moe]([m5C])[sp].[lna]([m5C])}$$$$V2.0 |
| 1123 | RNA1{[lna](T)[sp].[lna](G)[sp].[moe](T)[sp].m(T)[sp].[moe]([m5C])[sp]. |
| | [moe](T)[sp].[moe](T)[sp].[moe](G)[sp].[moe](T)[sp].[moe](A)[sp].[moe] |
| | ([m5C])[sp].[moe](T)[sp].[moe](T)[sp].[moe]([m5C])[sp].[moe](A)[sp].[ |
| | moe](T)[sp].[lna]([m5C])[sp].[lna]([m5C])}$$$$V2.0 |
| 1124 | RNA1{[lna](T)[sp].[lna](G)[sp].[lna](T)[sp].[moe](T)[sp].m([m5C])[sp].[ |
| | moe](T)[sp].[moe](T)[sp].[moe](G)[sp].[moe](T)[sp].[moe](A)[sp].[moe]( |
| | [m5C])[sp].[moe](T)[sp].[moe](T)[sp].[moe]([m5C])[sp].[moe](A)[sp].[ln |
| | a](T)[sp].[lna]([m5C])[sp].[lna]([m5C])}$$$$V2.0 |
| 1125 | RNA1{[lna](T)[sp].[lna](G)[sp].[lna](T)[sp].[lna](T)[sp].[moe]([m5C])[sp |
| | ].m(T)[sp].[moe](T)[sp].[moe](G)[sp].[moe](T)[sp].[moe](A)[sp].[moe]([ |
| | m5C])[sp].[moe](T)[sp].[moe](T)[sp].[moe]([m5C])[sp].[lna](A)[sp].[lna] |
| | (T)[sp].[lna]([m5C])[sp].[lna]([m5C])}$$$$V2.0 |
| 1126 | RNA1{[lna](T)[sp].[lna](G)[sp].[lna](T)[sp].[lna](T)[sp].[lna]([m5C])[sp]. |
| | [moe](T)[sp].m(T)[sp].[moe](G)[sp].[moe](T)[sp].[moe](A)[sp].[moe]([m |
| | 5C])[sp].[moe](T)[sp].[moe](T)[sp].[lna]([m5C])[sp].[lna](A)[sp].[lna](T) |
| | [sp].[lna]([m5C])[sp].[lna]([m5C])}$$$$V2.0 |
| 1127 | RNA1{[lna](T)[sp].[lna](G)[sp].[lna](T)[sp].[lna](T)[sp].[lna]([m5C])[sp]. |
| | [lna](T)[sp].[moe](T)[sp].m(G)[sp].[moe](T)[sp].[moe](A)[sp].[moe]([m5 |
| | C])[sp].[moe](T)[sp].[lna](T)[sp].[lna]([m5C])[sp].[lna](A)[sp].[lna](T)[sp |
| | ].[lna]([m5C])[sp].[lna]([m5C])}$$$$V2.0 |
| 1128 | RNA1{[lna](T)[sp].m(G)[sp].m(U)[sp].m(U)[sp].m(C)[sp].m(U)[sp].m(U) |
| | [sp].m(G)[sp].m(U)[sp].m(A)[sp].m(C)[sp].m(U)[sp].m(U)[sp].m(C)[sp]. |
| | m(A)[sp].m(U)[sp].[lna]([m5C])[sp].[lna]([m5C])}$$$$V2.0 |
| 1129 | RNA1{[lna](T)[sp].[lna](G)[sp].m(U)[sp].m(U)[sp].m(C)[sp].m(U)[sp].m( |
| | U)[sp].m(G)[sp].m(U)[sp].m(A)[sp].m(C)[sp].m(U)[sp].m(U)[sp].m(C)[sp |
| | ].m(A)[sp].m(U)[sp].m(C)[sp].[lna]([m5C])}$$$$V2.0 |
| 1130 | RNA1{[lna](T)[sp].m(G)[sp].m(U)[sp].m(U)[sp].m(C)[sp].m(U)[sp].m(U) |
| | [sp].m(G)[sp].m(U)[sp].m(A)[sp].m(C)[sp].m(U)[sp].m(U)[sp].m(C)[sp]. |
| | m(A)[sp].m(U)[sp].m(C)[sp].[lna]([m5C])}$$$$V2.0 |
| 1131 | RNA1{[lna](T)[sp].[lna](G)[sp].[lna](T)[sp].m(U)[sp].m(C)[sp].m(U)[sp]. |
| | m(U)[sp].m(G)[sp].m(U)[sp].m(A)[sp].m(C)[sp].m(U)[sp].m(U)[sp].m(C) |
| | [sp].m(A)[sp].[lna](T)[sp].[lna]([m5C])[sp].[lna]([m5C])}$$$$V2.0 |
| 1132 | RNA1{[lna](T)[sp].[lna](G)[sp].[lna](T)[sp].m(U)[sp].m(C)[sp].m(U)[sp]. |
| | m(U)[sp].m(G)[sp].m(U)[sp].m(A)[sp].m(C)[sp].m(U)[sp].m(U)[sp].m(C) |
| | [sp].m(A)[sp].m(U)[sp].[lna]([m5C])[sp].[lna]([m5C])}$$$$V2.0 |
| 1133 | RNA1{[lna](T)[sp].[lna](G)[sp].m(U)[sp].[lna](T)[sp].m(C)[sp].m(U)[sp]. |
| | m(U)[sp].m(G)[sp].m(U)[sp].m(A)[sp].m(C)[sp].m(U)[sp].m(U)[sp].m(C) |
| | [sp].m(A)[sp].m(U)[sp].[lna]([m5C])[sp].[lna]([m5C])}$$$$V2.0 |
| 1134 | RNA1{[lna](T)[sp].[lna](G)[sp].m(U)[sp].m(U)[sp].[lna]([m5C])[sp].m(U |
| | )[sp].m(U)[sp].m(G)[sp].m(U)[sp].m(A)[sp].m(C)[sp].m(U)[sp].m(U)[sp]. |
| | m(C)[sp].m(A)[sp].m(U)[sp].[lna]([m5C])[sp].[lna]([m5C])}$$$$V2.0 |
| 1135 | RNA1{[lna](T)[sp].[lna](G)[sp].m(U)[sp].m(U)[sp].m(C)[sp].[lna](T)[sp]. |
| | m(U)[sp].m(G)[sp].m(U)[sp].m(A)[sp].m(C)[sp].m(U)[sp].m(U)[sp].m(C) |
| | [sp].m(A)[sp].m(U)[sp].[lna]([m5C])[sp].[lna]([m5C])}$$$$V2.0 |
| 1136 | RNA1{[lna](T)[sp].[lna](G)[sp].m(U)[sp].m(U)[sp].m(C)[sp].m(U)[sp].[ln |
| | a](T)[sp].m(G)[sp].m(U)[sp].m(A)[sp].m(C)[sp].m(U)[sp].m(U)[sp].m(C)[ |
| | sp].m(A)[sp].m(U)[sp].[lna]([m5C])[sp].[lna]([m5C])}$$$$V2.0 |
| 1137 | RNA1{[lna](T)[sp].[lna](G)[sp].m(U)[sp].m(U)[sp].m(C)[sp].m(U)[sp].m( |
| | U)[sp].[lna](G)[sp].m(U)[sp].m(A)[sp].m(C)[sp].m(U)[sp].m(U)[sp].m(C) |
| | [sp].m(A)[sp].m(U)[sp].[lna]([m5C])[sp].[lna]([m5C])}$$$$V2.0 |
| 1138 | RNA1{[lna](T)[sp].[lna](G)[sp].m(U)[sp].m(U)[sp].m(C)[sp].m(U)[sp].m( |
| | U)[sp].m(G)[sp].[lna](T)[sp].m(A)[sp].m(C)[sp].m(U)[sp].m(U)[sp].m(C)[ |
| | sp].m(A)[sp].m(U)[sp].[lna]([m5C])[sp].[lna]([m5C])}$$$$V2.0 |
| 1139 | RNA1{[lna](T)[sp].[lna](G)[sp].m(U)[sp].m(U)[sp].m(C)[sp].m(U)[sp].m( |
| | U)[sp].m(G)[sp].m(U)[sp].[lna](A)[sp].m(C)[sp].m(U)[sp].m(U)[sp].m(C) |
| | [sp].m(A)[sp].m(U)[sp].[lna]([m5C])[sp].[lna]([m5C])}$$$$V2.0 |
| 1140 | RNA1{[lna](T)[sp].[lna](G)[sp].m(U)[sp].m(U)[sp].m(C)[sp].m(U)[sp].m( |
| | U)[sp].m(G)[sp].m(U)[sp].m(A)[sp].[lna]([m5C])[sp].m(U)[sp].m(U)[sp]. |
| | m(C)[sp].m(A)[sp].m(U)[sp].[lna]([m5C])[sp].[lna]([m5C])}$$$$V2.0 |
| 1141 | RNA1{[lna](T)[sp].[lna](G)[sp].m(U)[sp].m(U)[sp].m(C)[sp].m(U)[sp].m( |
| | U)[sp].m(G)[sp].m(U)[sp].m(A)[sp].m(C)[sp].[lna](T)[sp].m(U)[sp].m(C)[ |
| | sp].m(A)[sp].m(U)[sp].[lna]([m5C])[sp].[lna]([m5C])}$$$$V2.0 |
| 1142 | RNA1{[lna](T)[sp].[lna](G)[sp].m(U)[sp].m(U)[sp].m(C)[sp].m(U)[sp].m( |
| | U)[sp].m(G)[sp].m(U)[sp].m(A)[sp].m(C)[sp].m(U)[sp].[lna](T)[sp].m(C)[ |
| | sp].m(A)[sp].m(U)[sp].[lna]([m5C])[sp].[lna]([m5C])}$$$$V2.0 |
| 1143 | RNA1{[lna](T)[sp].[lna](G)[sp].m(U)[sp].m(U)[sp].m(C)[sp].m(U)[sp].m( |
| | U)[sp].m(G)[sp].m(U)[sp].m(A)[sp].m(C)[sp].m(U)[sp].m(U)[sp].[lna]([m |
| | 5C])[sp].m(A)[sp].m(U)[sp].[lna]([m5C])[sp].[lna]([m5C])}$$$$V2.0 |
| 1144 | RNA1{[lna](T)[sp].[lna](G)[sp].m(U)[sp].m(U)[sp].m(C)[sp].m(U)[sp].m( |
| | U)[sp].m(G)[sp].m(U)[sp].m(A)[sp].m(C)[sp].m(U)[sp].m(U)[sp].m(C)[sp |
| | ].[lna](A)[sp].m(U)[sp].[lna]([m5C])[sp].[lna]([m5C])}$$$$V2.0 |
| 1145 | RNA1{[lna](T)[sp].[lna](G)[sp].m(U)[sp].m(U)[sp].m(C)[sp].m(U)[sp].m( |
| | U)[sp].m(G)[sp].m(U)[sp].m(A)[sp].m(C)[sp].m(U)[sp].m(U)[sp].m(C)[sp |
| | ].m(A)[sp].[lna](T)[sp].[lna]([m5C])[sp].[lna]([m5C])}$$$$V2.0 |
| 1146 | RNA1{[lna](T)[sp].[lna](G)[sp].[lna](T)[sp].[lna](T)[sp].m(C)[sp].m(U)[s |
| | p].m(U)[sp].m(G)[sp].m(U)[sp].m(A)[sp].m(C)[sp].m(U)[sp].m(U)[sp].m( |
| | C)[sp].[lna](A)[sp].[lna](T)[sp].[lna]([m5C])[sp].[lna]([m5C])}$$$$V2.0 |
| 1147 | RNA1{[lna](T)[sp].[lna](G)[sp].[lna](T)[sp].[lna](T)[sp].[lna]([m5C])[sp]. |
| | m(U)[sp].m(U)[sp].m(G)[sp].m(U)[sp].m(A)[sp].m(C)[sp].m(U)[sp].m(U) |
| | [sp].[lna]([m5C])[sp].[lna](A)[sp].[lna](T)[sp].[lna]([m5C])[sp].[lna]([m5 |
| | C])}$$$$V2.0 |
| 1148 | RNA1{[moe](T)[sp].m(G)[sp].m(U)[sp].m(U)[sp].m(C)[sp].m(U)[sp].m( |
| | U)[sp].m(G)[sp].m(U)[sp].m(A)[sp].m(C)[sp].m(U)[sp].m(U)[sp].m(C)[sp |
| | ].m(A)[sp].m(U)[sp].m(C)[sp].[moe]([m5C])}$$$$V2.0 |
| 1149 | RNA1{[moe](T)[sp].[moe](G)[sp].m(U)[sp].m(U)[sp].m(C)[sp].m(U)[sp]. |
| | m(U)[sp].m(G)[sp].m(U)[sp].m(A)[sp].m(C)[sp].m(U)[sp].m(U)[sp].m(C) |
| | [sp].m(A)[sp].m(U)[sp].[moe]([m5C])[sp].[moe]([m5C])}$$$$V2.0 |
| 1150 | RNA1{[moe](T)[sp].[moe](G)[sp].[moe](T)[sp].m(U)[sp].m(C)[sp].m(U)[ |
| | sp].m(U)[sp].m(G)[sp].m(U)[sp].m(A)[sp].m(C)[sp].m(U)[sp].m(U)[sp].m |
| | (C)[sp].m(A)[sp].[moe](T)[sp].[moe]([m5C])[sp].[moe]([m5C])}$$$$V2. |
| | 0 |
| 1151 | RNA1{[moe](T)[sp].[moe](G)[sp].[moe](T)[sp].[moe](T)[sp].m(C)[sp].m( |
| | U)[sp].m(U)[sp].m(G)[sp].m(U)[sp].m(A)[sp].m(C)[sp].m(U)[sp].m(U)[sp |
| | ].m(C)[sp].[moe](A)[sp].[moe](T)[sp].[moe]([m5C])[sp].[moe]([m5C])}$ |
| | $$$V2.0 |
| 1152 | RNA1{[moe](T)[sp].[moe](G)[sp].[moe](T)[sp].[moe](T)[sp].[moe]([m5C |
| | ])[sp].m(U)[sp].m(U)[sp].m(G)[sp].m(U)[sp].m(A)[sp].m(C)[sp].m(U)[sp] |
| | .m(U)[sp].[moe]([m5C])[sp].[moe](A)[sp].[moe](T)[sp].[moe]([m5C])[sp] |
| | .[moe]([m5C])}$$$$V2.0 |
| 1153 | RNA1{[moe](T)[sp].[moe](G)[sp].[moe](T)[sp].[moe](T)[sp].[moe]([m5C |
| | ])[sp].[moe](T)[sp].m(U)[sp].m(G)[sp].m(U)[sp].m(A)[sp].m(C)[sp].m(U) |
| | [sp].[moe](T)[sp].[moe]([m5C])[sp].[moe](A)[sp].[moe](T)[sp].[moe]([m |
| | 5C])[sp].[moe]([m5C])}$$$$V2.0 |
| 1154 | RNA1{[moe](T)[sp].[moe](G)[sp].[moe](T)[sp].[moe](T)[sp].[moe]([m5C |
| | ])[sp].[moe](T)[sp].[moe](T)[sp].m(G)[sp].m(U)[sp].m(A)[sp].m(C)[sp].[ |
| | moe](T)[sp].[moe](T)[sp].[moe]([m5C])[sp].[moe](A)[sp].[moe](T)[sp].[ |
| | moe]([m5C])[sp].[moe]([m5C])}$$$$V2.0 |
| 1155 | RNA1{[moe](T)[sp].[moe](G)[sp].[moe](T)[sp].[moe](T)[sp].[moe]([m5C |
| | ])[sp].[moe](T)[sp].[moe](T)[sp].[moe](G)[sp].m(U)[sp].m(A)[sp].[moe]([ |
| | m5C])[sp].[moe](T)[sp].[moe](T)[sp].[moe]([m5C])[sp].[moe](A)[sp].[mo |
| | e](T)[sp].[moe]([m5C])[sp].[moe]([m5C])}$$$$V2.0 |
| 1156 | RNA1{[moe](T)[sp].[moe](G)[sp].[moe](T)[sp].[moe](T)[sp].[moe]([m5C |
| | ])[sp].[moe](T)[sp].[moe](T)[sp].[lna](G)[sp].[lna](T)[sp].[lna](A)[sp].[lna |
| | ]([m5C])[sp].[moe](T)[sp].[moe](T)[sp].[moe]([m5C])[sp].[moe](A)[sp].[ |
| | moe](T)[sp].[moe]([m5C])[sp].[moe]([m5C])}$$$$V2.0 |
| 1157 | RNA1{[lna](T)[sp].[lna](G)[sp].[moe](T)[sp].[moe](T)[sp].[moe]([m5C])[ |
| | sp].[moe](T)[sp].[moe](T)[sp].[lna](G)[sp].[lna](T)[sp].[lna](A)[sp].[lna]([ |
| | m5C])[sp].[moe](T)[sp].[moe](T)[sp].[moe]([m5C])[sp].[moe](A)[sp].[mo |
| | e](T)[sp].[lna]([m5C])[sp].[lna]([m5C])}$$$$V2.0 |
| 1158 | RNA1{m(U)[sp].m(G)[sp].m(U)[sp].m(U)[sp].m(C)[sp].m(U)[sp].m(U)[s |
| | p].[lna](G)[sp].[lna](T)[sp].[lna](A)[sp].[lna]([m5C])[sp].m(U)[sp].m(U)[s |
| | p].m(C)[sp].m(A)[sp].m(U)[sp].m(C)[sp].m(C)}$$$$V2.0 |
| 1159 | RNA1{[lna](T)[sp].[lna](G)[sp].m(U)[sp].m(U)[sp].m(C)[sp].m(U)[sp].m( |
| | U)[sp].[moe](G)[sp].[moe](T)[sp].[moe](A)[sp].[moe]([m5C])[sp].m(U)[s |
| | p].m(U)[sp].m(C)[sp].m(A)[sp].m(U)[sp].[lna]([m5C])[sp].[lna]([m5C])}$ |
| | $$$V2.0 |
| 1160 | RNA1{[lna](T)[sp].[lna](G)[sp].m(U)[sp].m(U)[sp].m(C)[sp].m(U)[sp].m( |
| | U)[sp].[lna](G)[sp].[lna](T)[sp].[lna](A)[sp].[lna]([m5C])[sp].m(U)[sp].m( |
| | U)[sp].m(C)[sp].m(A)[sp].m(U)[sp].[lna]([m5C])[sp].[lna]([m5C])}$$$$V |
| | 2.0 |
| 1161 | RNA1{[lna](T)[sp].[lna](G)[sp].[moe](T)[sp].[moe](T)[sp].[moe]([m5C])[ |
| | sp].[moe](T)[sp].[moe](T)[sp].m(G)[sp].m(U)[sp].m(A)[sp].m(C)[sp].[mo |
| | e](T)[sp].[moe](T)[sp].[moe]([m5C])[sp].[moe](A)[sp].[moe](T)[sp].[lna]( |
| | [m5C])[sp].[lna]([m5C])}$$$$V2.0 |
| 1162 | RNA1{[moe](G)[sp].[moe](G)[sp].[moe](T)[sp].[moe](G)[sp].[moe](T)[s |
| | p].[moe](T)[sp].[moe]([m5C])[sp].[moe](T)[sp].[moe](T)[sp].m(G)[sp].m( |
| | U)[sp].m(A)[sp].m(C)[sp].[moe](T)[sp].[moe](T)[sp].[moe]([m5C])}$$$$ |
| | V2.0 |
| 1163 | RNA1{[lna](G)[sp].[moe](G)[sp].[moe](T)[sp].[moe](G)[sp].[moe](T)[sp] |
| | .[moe](T)[sp].[moe]([m5C])[sp].[moe](T)[sp].[moe](T)[sp].m(G)[sp].m(U |
| | )[sp].m(A)[sp].m(C)[sp].[moe](T)[sp].[moe](T)[sp].[lna]([m5C])}$$$$V2. |
| | 0 |
| 1164 | RNA1{[moe](T)[sp].[moe](G)[sp].[moe](T)[sp].[moe](T)[sp].[moe]([m5C |
| | ])[sp].[moe](T)[sp].[moe](T)[sp].m(G)[sp].m(U)[sp].m(A)[sp].m(C)[sp].[ |
| | moe](T)[sp].[moe](T)[sp].[moe]([m5C])[sp].[moe](A)[sp].[moe](T)}$$$$ |
| | V2.0 |
| 1165 | RNA1{[moe](T)[sp].[moe](G)[sp].[moe](T)[sp].[fl2r](T)[sp].[moe]([m5C |
| | ])[sp].[moe](T)[sp].[moe](T)[sp].[moe](G)[sp].[fl2r](T)[sp].[fl2r](A)[sp].[ |
| | moe]([m5C])[sp].[moe](T)[sp].[moe](T)[sp].[moe]([m5C])[sp].[fl2r](A)[s |
| | p].[moe](T)[sp].[moe]([m5C])[sp].[moe]([m5C])}$$$$V2.0 |
| 1166 | RNA1{[moe](T)[sp].[moe](G)[sp].[moe](T)[sp].[fl2r](T)[sp].[fl2r]([m5C] |
| | )[sp].[moe](T)[sp].[moe](T)[sp].[moe](G)[sp].[fl2r](T)[sp].[fl2r](A)[sp].[ |
| | moe]([m5C])[sp].[moe](T)[sp].[moe](T)[sp].[fl2r]([m5C])[sp].[fl2r](A)[sp |
| | ].[moe](T)[sp].[moe]([m5C])[sp].[moe]([m5C])}$$$$V2.0 |
| 1167 | RNA1{[moe](T)[sp].[moe](G)[sp].[moe](T)[sp].[fl2r](T)[sp].[fl2r]([m5C] |
| | )[sp].[fl2r](T)[sp].[moe](T)[sp].[moe](G)[sp].[fl2r](T)[sp].[fl2r](A)[sp].[m |
| | oe]([m5C])[sp].[moe](T)[sp].[fl2r](T)[sp].[fl2r]([m5C])[sp].[fl2r](A)[sp].[ |
| | moe](T)[sp].[moe]([m5C])[sp].[moe]([m5C])}$$$$V2.0 |
| 1168 | RNA1{[moe](T)[sp].[moe](G)[sp].[moe](T)[sp].[fl2r](T)[sp].[fl2r]([m5C] |
| | )[sp].[fl2r](T)[sp].[fl2r](T)[sp].[moe](G)[sp].[fl2r](T)[sp].[fl2r](A)[sp].[m |
| | oe]([m5C])[sp].[fl2r](T)[sp].[fl2r](T)[sp].[fl2r]([m5C])[sp].[fl2r](A)[sp].[ |
| | moe](T)[sp].[moe]([m5C])[sp].[moe]([m5C])}$$$$V2.0 |
| 1169 | RNA1{[moe](T)[sp].[moe](G)[sp].[fl2r](T)[sp].[fl2r](T)[sp].[fl2r]([m5C]) |
| | [sp].[fl2r](T)[sp].[fl2r](T)[sp].[fl2r](G)[sp].[fl2r](T)[sp].[fl2r](A)[sp].[fl2r] |
| | ([m5C])[sp].[fl2r](T)[sp].[fl2r](T)[sp].[fl2r]([m5C])[sp].[fl2r](A)[sp].[fl2r] |
| | (T)[sp].[moe]([m5C])[sp].[moe]([m5C])}$$$$V2.0 |
| 1170 | RNA1{[moe](T)[sp].[moe](G)[sp].[moe](T)[sp].[fl2r](T)[sp].[moe]([m5C |
| | ])[sp].[moe](T)[sp].[moe](T)[sp].[moe](G)[sp].[moe](T)[sp].[moe](A)[sp]. |
| | [moe]([m5C])[sp].[moe](T)[sp].[moe](T)[sp].[moe]([m5C])[sp].[fl2r](A)[s |
| | p].[moe](T)[sp].[moe]([m5C])[sp].[moe]([m5C])}$$$$V2.0 |
| 1171 | RNA1{[moe](T)[sp].[moe](G)[sp].[moe](T)[sp].[fl2r](T)[sp].[fl2r]([m5C] |
| | )[sp].[moe](T)[sp].[moe](T)[sp].[moe](G)[sp].[moe](T)[sp].[moe](A)[sp].[ |
| | moe]([m5C])[sp].[moe](T)[sp].[moe](T)[sp].[fl2r]([m5C])[sp].[fl2r](A)[sp |
| | ].[moe](T)[sp].[moe]([m5C])[sp].[moe]([m5C])}$$$$V2.0 |
| 1172 | RNA1{[moe](T)[sp].[moe](G)[sp].[moe](T)[sp].[fl2r](T)[sp].[fl2r]([m5C] |
| | )[sp].[fl2r](T)[sp].[moe](T)[sp].[moe](G)[sp].[moe](T)[sp].[moe](A)[sp].[ |
| | moe]([m5C])[sp].[moe](T)[sp].[fl2r](T)[sp].[fl2r]([m5C])[sp].[fl2r](A)[sp] |
| | .[moe](T)[sp].[moe]([m5C])[sp].[moe]([m5C])}$$$$V2.0 |
| 1173 | RNA1{[moe](T)[sp].[moe](G)[sp].[moe](T)[sp].[fl2r](T)[sp].[fl2r]([m5C] |
| | )[sp].[fl2r](T)[sp].[fl2r](T)[sp].[moe](G)[sp].[moe](T)[sp].[moe](A)[sp].[ |
| | moe]([m5C])[sp].[fl2r](T)[sp].[fl2r](T)[sp].[fl2r]([m5C])[sp].[fl2r](A)[sp]. |
| | [moe](T)[sp].[moe]([m5C])[sp].[moe]([m5C])}$$$$V2.0 |
| 1174 | RNA1{[moe](T)[sp].[moe](G)[sp].[moe](T)[sp].[fl2r](T)[sp].[fl2r]([m5C] |
| | )[sp].[moe](T)[sp].[moe](T)[sp].[moe](G)[sp].[fl2r](T)[sp].[fl2r](A)[sp].[ |
| | moe]([m5C])[sp].[moe](T)[sp].[moe](T)[sp].[moe]([m5C])[sp].[moe](A)[s |
| | p].[moe](T)[sp].[moe]([m5C])[sp].[moe]([m5C])}$$$$V2.0 |
| 1175 | RNA1{[moe](T)[sp].[moe](G)[sp].[moe](T)[sp].[fl2r](T)[sp].[fl2r]([m5C] |
| | )[sp].[fl2r](T)[sp].[fl2r](T)[sp].[moe](G)[sp].[fl2r](T)[sp].[fl2r](A)[sp].[m |
| | oe]([m5C])[sp].[moe](T)[sp].[moe](T)[sp].[moe]([m5C])[sp].[moe](A)[sp] |
| | .[moe](T)[sp].[moe]([m5C])[sp].[moe]([m5C])}$$$$V2.0 |
| 1176 | RNA1{[moe](T)[sp].[moe](G)[sp].[moe](T)[sp].[moe](T)[sp].[moe]([m5C |
| | ])[sp].[moe](T)[sp].[moe](T)[sp].[moe](G)[sp].[fl2r](T)[sp].[fl2r](A)[sp].[ |
| | moe]([m5C])[sp].[moe](T)[sp].[moe](T)[sp].[fl2r]([m5C])[sp].[fl2r](A)[sp |
| | ].[moe](T)[sp].[moe]([m5C])[sp].[moe]([m5C])}$$$$V2.0 |
| 1177 | RNA1{[moe](T)[sp].[moe](G)[sp].[moe](T)[sp].[moe](T)[sp].[moe]([m5C |
| | ])[sp].[moe](T)[sp].[moe](T)[sp].[moe](G)[sp].[fl2r](T)[sp].[fl2r](A)[sp].[ |
| | moe]([m5C])[sp].[fl2r](T)[sp].[fl2r](T)[sp].[fl2r]([m5C])[sp].[fl2r](A)[sp]. |
| | [moe](T)[sp].[moe]([m5C])[sp].[moe]([m5C])}$$$$V2.0 |
| 1178 | RNA1{[moe](T)[sp].[moe](G)[sp].[moe](T)[sp].[moe](T)[sp].[fl2r]([m5C |
| | ])[sp].[fl2r](T)[sp].[moe](T)[sp].[moe](G)[sp].[fl2r](T)[sp].[fl2r](A)[sp].[ |
| | moe]([m5C])[sp].[moe](T)[sp].[fl2r](T)[sp].[fl2r]([m5C])[sp].[fl2r](A)[sp] |
| | .[moe](T)[sp].[moe]([m5C])[sp].[moe]([m5C])}$$$$V2.0 |
| 1179 | RNA1{[moe](T)[sp].[moe](G)[sp].[moe](T)[sp].[moe](T)[sp].[fl2r]([m5C |
| | ])[sp].[fl2r](T)[sp].[fl2r](T)[sp].[moe](G)[sp].[fl2r](T)[sp].[fl2r](A)[sp].[m |
| | oe]([m5C])[sp].[moe](T)[sp].[moe](T)[sp].[fl2r]([m5C])[sp].[fl2r](A)[sp]. |
| | [moe](T)[sp].[moe]([m5C])[sp].[moe]([m5C])}$$$$V2.0 |
| 1180 | RNA1{[moe](T)[sp].[moe](G)[sp].[moe](T)[sp].[fl2r](T)[sp].[fl2r]([m5C] |
| | )[sp].[moe](T)[sp].[moe](T)[sp].[moe](G)[sp].[moe](T)[sp].[moe](A)[sp].[ |
| | moe]([m5C])[sp].[moe](T)[sp].[moe](T)[sp].[moe]([m5C])[sp].[moe](A)[s |
| | p].[moe](T)[sp].[moe]([m5C])[sp].[moe]([m5C])}$$$$V2.0 |
| 1181 | RNA1{[moe](T)[sp].[moe](G)[sp].[moe](T)[sp].[fl2r](T)[sp].[fl2r]([m5C] |
| | )[sp].[fl2r](T)[sp].[fl2r](T)[sp].[moe](G)[sp].[moe](T)[sp].[moe](A)[sp].[ |
| | moe]([m5C])[sp].[moe](T)[sp].[moe](T)[sp].[moe]([m5C])[sp].[moe](A)[s |
| | p].[moe](T)[sp].[moe]([m5C])[sp].[moe]([m5C])}$$$$V2.0 |
| 1182 | RNA1{[moe](T)[sp].[moe](G)[sp].[moe](T)[sp].[moe](T)[sp].[moe]([m5C |
| | ])[sp].[moe](T)[sp].[moe](T)[sp].[moe](G)[sp].[moe](T)[sp].[moe](A)[sp]. |
| | [moe]([m5C])[sp].[moe](T)[sp].[moe](T)[sp].[fl2r]([m5C])[sp].[fl2r](A)[s |
| | p].[moe](T)[sp].[moe]([m5C])[sp].[moe]([m5C])}$$$$V2.0 |
| 1183 | RNA1{[moe](T)[sp].[moe](G)[sp].[moe](T)[sp].[moe](T)[sp].[moe]([m5C |
| | ])[sp].[moe](T)[sp].[moe](T)[sp].[moe](G)[sp].[moe](T)[sp].[moe](A)[sp]. |
| | [moe]([m5C])[sp].[fl2r](T)[sp].[fl2r](T)[sp].[fl2r]([m5C])[sp].[fl2r](A)[sp] |
| | .[moe](T)[sp].[moe]([m5C])[sp].[moe]([m5C])}$$$$V2.0 |
| 1184 | RNA1{[moe](T)[sp].[moe](G)[sp].[moe](T)[sp].[moe](T)[sp].[fl2r]([m5C |
| | ])[sp].[fl2r](T)[sp].[moe](T)[sp].[moe](G)[sp].[moe](T)[sp].[moe](A)[sp].[ |
| | moe]([m5C])[sp].[moe](T)[sp].[fl2r](T)[sp].[fl2r]([m5C])[sp].[fl2r](A)[sp] |
| | .[moe](T)[sp].[moe]([m5C])[sp].[moe]([m5C])}$$$$V2.0 |
| 1185 | RNA1{[moe](T)[sp].[moe](G)[sp].[moe](T)[sp].[moe](T)[sp].[fl2r]([m5C |
| | ])[sp].[fl2r](T)[sp].[fl2r](T)[sp].[moe](G)[sp].[moe](T)[sp].[moe](A)[sp].[ |
| | moe]([m5C])[sp].[moe](T)[sp].[moe](T)[sp].[fl2r]([m5C])[sp].[fl2r](A)[sp |
| | ].[moe](T)[sp].[moe]([m5C])[sp].[moe]([m5C])}$$$$V2.0 |
| 1186 | RNA1{[moe](T)[sp].[moe](G)[sp].[moe](T)[sp].[moe](T)[sp].[fl2r]([m5C |
| | ])[sp].[moe](T)[sp].[moe](T)[sp].[moe](G)[sp].[fl2r](T)[sp].[fl2r](A)[sp].[ |
| | moe]([m5C])[sp].[moe](T)[sp].[fl2r](T)[sp].[fl2r]([m5C])[sp].[fl2r](A)[sp] |
| | .[moe](T)[sp].[moe]([m5C])[sp].[moe]([m5C])}$$$$V2.0 |
| 1187 | RNA1{[moe](T)[sp].[moe](G)[sp].[moe](T)[sp].[fl2r](T)[sp].[fl2r]([m5C] |
| | )[sp].[moe](T)[sp].[moe](T)[sp].[moe](G)[sp].[fl2r](T)[sp].[fl2r](A)[sp].[ |
| | moe]([m5C])[sp].[moe](T)[sp].[fl2r](T)[sp].[fl2r]([m5C])[sp].[fl2r](A)[sp] |
| | .[moe](T)[sp].[moe]([m5C])[sp].[moe]([m5C])}$$$$V2.0 |
| 1188 | RNA1{[moe](T)[sp].[moe](G)[sp].[moe](T)[sp].[fl2r](T)[sp].[fl2r]([m5C] |
| | )[sp].[fl2r](T)[sp].[moe](T)[sp].[moe](G)[sp].[fl2r](T)[sp].[fl2r](A)[sp].[m |
| | oe]([m5C])[sp].[moe](T)[sp].[moe](T)[sp].[fl2r]([m5C])[sp].[moe](A)[sp]. |
| | [moe](T)[sp].[moe]([m5C])[sp].[moe]([m5C])}$$$$V2.0 |
| 1189 | RNA1{[moe](T)[sp].[moe](G)[sp].[moe](T)[sp].[fl2r](T)[sp].[fl2r]([m5C] |
| | )[sp].[fl2r](T)[sp].[moe](T)[sp].[moe](G)[sp].[fl2r](T)[sp].[fl2r](A)[sp].[m |
| | oe]([m5C])[sp].[moe](T)[sp].[moe](T)[sp].[fl2r]([m5C])[sp].[fl2r](A)[sp]. |
| | [moe](T)[sp].[moe]([m5C])[sp].[moe]([m5C])}$$$$V2.0 |
| 1190 | RNA1{[moe](T)[sp].[moe](G)[sp].[moe](T)[sp].[moe](T)[sp].[fl2r]([m5C |
| | ])[sp].[moe](T)[sp].[moe](T)[sp].[moe](G)[sp].[moe](T)[sp].[moe](A)[sp]. |
| | [moe]([m5C])[sp].[moe](T)[sp].[fl2r](T)[sp].[fl2r]([m5C])[sp].[fl2r](A)[sp |
| | ].[moe](T)[sp].[moe]([m5C])[sp].[moe]([m5C])}$$$$V2.0 |
| 1191 | RNA1{[moe](T)[sp].[moe](G)[sp].[moe](T)[sp].[fl2r](T)[sp].[fl2r]([m5C] |
| | )[sp].[moe](T)[sp].[moe](T)[sp].[moe](G)[sp].[moe](T)[sp].[moe](A)[sp].[ |
| | moe]([m5C])[sp].[moe](T)[sp].[fl2r](T)[sp].[fl2r]([m5C])[sp].[fl2r](A)[sp] |
| | .[moe](T)[sp].[moe]([m5C])[sp].[moe]([m5C])}$$$$V2.0 |
| 1192 | RNA1{[moe](T)[sp].[moe](G)[sp].[moe](T)[sp].[fl2r](T)[sp].[fl2r]([m5C] |
| | )[sp].[fl2r](T)[sp].[moe](T)[sp].[moe](G)[sp].[moe](T)[sp].[moe](A)[sp].[ |
| | moe]([m5C])[sp].[moe](T)[sp].[moe](T)[sp].[fl2r]([m5C])[sp].[moe](A)[s |
| | p].[moe](T)[sp].[moe]([m5C])[sp].[moe]([m5C])}$$$$V2.0 |
| 1193 | RNA1{[moe](T)[sp].[moe](G)[sp].[moe](T)[sp].[fl2r](T)[sp].[fl2r]([m5C] |
| | )[sp].[fl2r](T)[sp].[moe](T)[sp].[moe](G)[sp].[moe](T)[sp].[moe](A)[sp].[ |
| | moe]([m5C])[sp].[moe](T)[sp].[moe](T)[sp].[fl2r]([m5C])[sp].[fl2r](A)[sp |
| | ].[moe](T)[sp].[moe]([m5C])[sp].[moe]([m5C])}$$$$V2.0 |
| 1194 | RNA1{[lna](T)[sp].[moe](G)[sp].[moe](T)[sp].[fl2r](T)[sp].[fl2r]([m5C])[ |
| | sp].[moe](T)[sp].[moe](T)[sp].[moe](G)[sp].[fl2r](T)[sp].[fl2r](A)[sp].[mo |
| | e]([m5C])[sp].[moe](T)[sp].[moe](T)[sp].[fl2r]([m5C])[sp].[fl2r](A)[sp].[ |
| | moe](T)[sp].[moe]([m5C])[sp].[lna]([m5C])}$$$$V2.0 |
| 1195 | RNA1{[lna](T)[sp].[moe](G)[sp].[moe](T)[sp].[fl2r](T)[sp].[fl2r]([m5C])[ |
| | sp].[fl2r](T)[sp].[fl2r](T)[sp].[moe](G)[sp].[fl2r](T)[sp].[fl2r](A)[sp].[moe |
| | ]([m5C])[sp].[fl2r](T)[sp].[fl2r](T)[sp].[fl2r]([m5C])[sp].[fl2r](A)[sp].[mo |
| | e](T)[sp].[moe]([m5C])[sp].[lna]([m5C])}$$$$V2.0 |
| 1196 | RNA1{[lna](T)[sp].[moe](G)[sp].[moe](T)[sp].[fl2r](T)[sp].[fl2r]([m5C])[ |
| | sp].[moe](T)[sp].[moe](T)[sp].[moe](G)[sp].[moe](T)[sp].[moe](A)[sp].[ |
| | moe]([m5C])[sp].[moe](T)[sp].[moe](T)[sp].[fl2r]([m5C])[sp].[fl2r](A)[sp |
| | ].[moe](T)[sp].[moe]([m5C])[sp].[lna]([m5C])}$$$$V2.0 |
| 1197 | RNA1{[lna](T)[sp].[moe](G)[sp].[moe](T)[sp].[fl2r](T)[sp].[fl2r]([m5C])[ |
| | sp].[moe](T)[sp].[moe](T)[sp].[moe](G)[sp].[fl2r](T)[sp].[fl2r](A)[sp].[mo |
| | e]([m5C])[sp].[moe](T)[sp].[moe](T)[sp].[moe]([m5C])[sp].[moe](A)[sp]. |
| | [moe](T)[sp].[moe]([m5C])[sp].[lna]([m5C])}$$$$V2.0 |
| 1198 | RNA1{[lna](T)[sp].[moe](G)[sp].[moe](T)[sp].[moe](T)[sp].[moe]([m5C] |
| | )[sp].[moe](T)[sp].[moe](T)[sp].[moe](G)[sp].[fl2r](T)[sp].[fl2r](A)[sp].[ |
| | moe]([m5C])[sp].[moe](T)[sp].[moe](T)[sp].[fl2r]([m5C])[sp].[fl2r](A)[sp |
| | ].[moe](T)[sp].[moe]([m5C])[sp].[lna]([m5C])}$$$$V2.0 |
| 1199 | RNA1{[lna](T)[sp].[moe](G)[sp].[moe](T)[sp].[moe](T)[sp].[fl2r]([m5C]) |
| | [sp].[fl2r](T)[sp].[moe](T)[sp].[moe](G)[sp].[fl2r](T)[sp].[fl2r](A)[sp].[m |
| | oe]([m5C])[sp].[moe](T)[sp].[fl2r](T)[sp].[fl2r]([m5C])[sp].[fl2r](A)[sp].[ |
| | moe](T)[sp].[moe]([m5C])[sp].[lna]([m5C])}$$$$V2.0 |
| 1200 | RNA1{[lna](T)[sp].[moe](G)[sp].[moe](T)[sp].[moe](T)[sp].[fl2r]([m5C]) |
| | [sp].[fl2r](T)[sp].[fl2r](T)[sp].[moe](G)[sp].[fl2r](T)[sp].[fl2r](A)[sp].[mo |
| | e]([m5C])[sp].[moe](T)[sp].[moe](T)[sp].[fl2r]([m5C])[sp].[fl2r](A)[sp].[ |
| | moe](T)[sp].[moe]([m5C])[sp].[lna]([m5C])}$$$$V2.0 |
| 1201 | RNA1{[lna](T)[sp].[moe](G)[sp].[moe](T)[sp].[fl2r](T)[sp].[fl2r]([m5C])[ |
| | sp].[moe](T)[sp].[moe](T)[sp].[moe](G)[sp].[moe](T)[sp].[moe](A)[sp].[ |
| | moe]([m5C])[sp].[moe](T)[sp].[moe](T)[sp].[moe]([m5C])[sp].[moe](A)[s |
| | p].[moe](T)[sp].[moe]([m5C])[sp].[lna]([m5C])}$$$$V2.0 |
| 1202 | RNA1{[lna](T)[sp].[moe](G)[sp].[moe](T)[sp].[moe](T)[sp].[moe]([m5C] |
| | )[sp].[moe](T)[sp].[moe](T)[sp].[moe](G)[sp].[moe](T)[sp].[moe](A)[sp].[ |
| | moe]([m5C])[sp].[moe](T)[sp].[moe](T)[sp].[fl2r]([m5C])[sp].[fl2r](A)[sp |
| | ].[moe](T)[sp].[moe]([m5C])[sp].[lna]([m5C])}$$$$V2.0 |
| 1203 | RNA1{[lna](T)[sp].[moe](G)[sp].[moe](T)[sp].[moe](T)[sp].[fl2r]([m5C]) |
| | [sp].[fl2r](T)[sp].[moe](T)[sp].[moe](G)[sp].[moe](T)[sp].[moe](A)[sp].[ |
| | moe]([m5C])[sp].[moe](T)[sp].[fl2r](T)[sp].[fl2r]([m5C])[sp].[fl2r](A)[sp] |
| | .[moe](T)[sp].[moe]([m5C])[sp].[lna]([m5C])}$$$$V2.0 |
| 1204 | RNA1{[lna](T)[sp].[moe](G)[sp].[moe](T)[sp].[moe](T)[sp].[fl2r]([m5C]) |
| | [sp].[fl2r](T)[sp].[fl2r](T)[sp].[moe](G)[sp].[moe](T)[sp].[moe](A)[sp].[m |
| | oe]([m5C])[sp].[moe](T)[sp].[moe](T)[sp].[fl2r]([m5C])[sp].[fl2r](A)[sp]. |
| | [moe](T)[sp].[moe]([m5C])[sp].[lna]([m5C])}$$$$V2.0 |
| 1205 | RNA1{[lna](T)[sp].[lna](G)[sp].[fl2r](T)[sp].[fl2r](T)[sp].[fl2r]([m5C])[s |
| | p].[fl2r](T)[sp].[fl2r](T)[sp].[fl2r](G)[sp].[fl2r](T)[sp].[fl2r](A)[sp].[fl2r]([ |
| | m5C])[sp].[fl2r](T)[sp].[fl2r](T)[sp].[fl2r]([m5C])[sp].[fl2r](A)[sp].[fl2r]( |
| | T)[sp].[lna]([m5C])[sp].[lna]([m5C])}$$$$V2.0 |
| 1206 | RNA1{[lna](T)[sp].[lna](G)[sp].[lna](T)[sp].[fl2r](T)[sp].[fl2r]([m5C])[sp |
| | ].[fl2r](T)[sp].[fl2r](T)[sp].[fl2r](G)[sp].[fl2r](T)[sp].[fl2r](A)[sp].[fl2r]([ |
| | m5C])[sp].[fl2r](T)[sp].[fl2r](T)[sp].[fl2r]([m5C])[sp].[fl2r](A)[sp].[lna]( |
| | T)[sp].[lna]([m5C])[sp].[lna]([m5C])}$$$$V2.0 |
| 1207 | RNA1{[lna](T)[sp].[lna](G)[sp].[lna](T)[sp].[lna](T)[sp].[fl2r]([m5C])[sp] |
| | .[fl2r](T)[sp].[fl2r](T)[sp].[fl2r](G)[sp].[fl2r](T)[sp].[fl2r](A)[sp].[fl2r]([m |
| | 5C])[sp].[fl2r](T)[sp].[fl2r](T)[sp].[fl2r]([m5C])[sp].[lna](A)[sp].[lna](T)[ |
| | sp].[lna]([m5C])[sp].[lna]([m5C])}$$$$V2.0 |
| 1208 | RNA1{[lna](T)[sp].[lna](G)[sp].[lna](T)[sp].[lna](T)[sp].[lna]([m5C])[sp]. |
| | [fl2r](T)[sp].[fl2r](T)[sp].[fl2r](G)[sp].[fl2r](T)[sp].[fl2r](A)[sp].[fl2r]([m |
| | 5C])[sp].[fl2r](T)[sp].[fl2r](T)[sp].[lna]([m5C])[sp].[lna](A)[sp].[lna](T)[s |
| | p].[lna]([m5C])[sp].[lna]([m5C])}$$$$V2.0 |
| 1209 | RNA1{[lna](T)[sp].[lna](G)[sp].[moe](T)[sp].[moe](T)[sp].[moe]([m5C])[ |
| | sp].[moe](T)[sp].[moe](T)[sp].[fl2r](G)[sp].[fl2r](T)[sp].[fl2r](A)[sp].[fl2r |
| | ]([m5C])[sp].[moe](T)[sp].[moe](T)[sp].[moe]([m5C])[sp].[moe](A)[sp].[ |
| | moe](T)[sp].[lna]([m5C])[sp].[lna]([m5C])}$$$$V2.0 |
| 1210 | RNA1{[lna](T)[sp].[lna](G)[sp].[moe](T)[sp].[moe](T)[sp].[moe]([m5C])[ |
| | sp].[moe](T)[sp].[fl2r](T)[sp].[fl2r](G)[sp].[fl2r](T)[sp].[fl2r](A)[sp].[fl2r] |
| | ([m5C])[sp].[fl2r](T)[sp].[moe](T)[sp].[moe]([m5C])[sp].[moe](A)[sp].[m |
| | oe](T)[sp].[lna]([m5C])[sp].[lna]([m5C])}$$$$V2.0 |
| 1211 | RNA1{[lna](T)[sp].[lna](G)[sp].[moe](T)[sp].[moe](T)[sp].[moe]([m5C])[ |
| | sp].[fl2r](T)[sp].[fl2r](T)[sp].[fl2r](G)[sp].[fl2r](T)[sp].[fl2r](A)[sp].[fl2r]( |
| | [m5C])[sp].[fl2r](T)[sp].[fl2r](T)[sp].[moe]([m5C])[sp].[moe](A)[sp].[mo |
| | e](T)[sp].[lna]([m5C])[sp].[lna]([m5C])}$$$$V2.0 |
| 1212 | RNA1{[lna](T)[sp].[lna](G)[sp].[moe](T)[sp].[moe](T)[sp].[fl2r]([m5C])[ |
| | sp].[fl2r](T)[sp].[fl2r](T)[sp].[fl2r](G)[sp].[fl2r](T)[sp].[fl2r](A)[sp].[fl2r]( |
| | [m5C])[sp].[fl2r](T)[sp].[fl2r](T)[sp].[fl2r]([m5C])[sp].[moe](A)[sp].[moe |
| | ](T)[sp].[lna]([m5C])[sp].[lna]([m5C])}$$$$V2.0 |
| 1213 | RNA1{[lna](A)[sp].[moe](A)[sp].[moe](T)[sp].[moe](T)[sp].[moe]([m5C] |
| | )[sp].[moe](T)[sp].[moe](T)[sp].[moe](T)[sp].[moe]([m5C])[sp].[moe](A) |
| | [sp].[moe](A)[sp].[moe]([m5C])[sp].[moe](T)[sp].[moe](A)[sp].[moe](G) |
| | }$$$$V2.0 |
| 1214 | RNA1{[moe](A)[sp].[moe](A)[sp].[moe](T)[sp].[moe](T)[sp].[moe]([m5 |
| | C])[sp].[moe](T)[sp].[moe](T)[sp].[moe](T)[sp].[moe]([m5C])[sp].[moe]( |
| | A)[sp].[moe](A)[sp].[moe]([m5C])[sp].[moe](T)[sp].[moe](A)[sp].[lna](G |
| | )}$$$$V2.0 |
| 1215 | RNA1{[lna](A)[sp].[moe](A)[sp].[moe](T)[sp].[moe](T)[sp].[moe]([m5C] |
| | )[sp].[moe](T)[sp].[moe](T)[sp].[moe](T)[sp].[moe]([m5C])[sp].[moe](A) |
| | [sp].[moe](A)[sp].[moe]([m5C])[sp].[moe](T)[sp].[moe](A)[sp].[lna](G)} |
| | $$$$V2.0 |
| 1216 | RNA1{[lna](A)[sp].[lna](A)[sp].[moe](T)[sp].[moe](T)[sp].[moe]([m5C]) |
| | [sp].[moe](T)[sp].[moe](T)[sp].[moe](T)[sp].[moe]([m5C])[sp].[moe](A)[ |
| | sp].[moe](A)[sp].[moe]([m5C])[sp].[moe](T)[sp].[moe](A)[sp].[lna](G)}$ |
| | $$$V2.0 |
| 1217 | RNA1{[lna](A)[sp].[moe](A)[sp].[moe](T)[sp].[moe](T)[sp].[moe]([m5C] |
| | )[sp].[moe](T)[sp].[moe](T)[sp].[moe](T)[sp].[moe]([m5C])[sp].[moe](A) |
| | [sp].[moe](A)[sp].[moe]([m5C])[sp].[moe](T)[sp].[lna](A)[sp].[lna](G)}$ |
| | $$$V2.0 |
| 1218 | RNA1{[lna](A)[sp].[lna](A)[sp].[moe](T)[sp].[moe](T)[sp].[moe]([m5C]) |
| | [sp].[moe](T)[sp].[moe](T)[sp].[moe](T)[sp].[moe]([m5C])[sp].[moe](A)[ |
| | sp].[moe](A)[sp].[moe]([m5C])[sp].[moe](T)[sp].[lna](A)[sp].[lna](G)}$$ |
| | $$V2.0 |
| 1219 | RNA1{[moe](A)[sp].[moe](A)[sp].[moe](T)[sp].[moe](T)[sp].[moe]([m5 |
| | C])[sp].[moe](T)[sp].[moe](T)[sp].[moe](T)[sp].[moe]([m5C])[sp].[moe]( |
| | A)[sp].[moe](A)[sp].[moe]([m5C])[sp].[moe](T)[sp].[lna](A)[sp].[lna](G) |
| | }$$$$V2.0 |
| 1220 | RNA1{[lna](T)[sp].m(C)[sp].m(U)[sp].m(G)[sp].m(A)[sp].m(A)[sp].m(U) |
| | [sp].m(U)[sp].m(C)[sp].m(U)[sp].m(U)[sp].m(U)[sp].[lna]([m5C])[sp].m( |
| | A)[sp].m(A)[sp].m(C)[sp].m(U)[sp].m(A)[sp].m(G)[sp].[lna](A)}$$$$V2. |
| | 0 |
| 1221 | RNA1{[moe](T)[sp].[moe]([m5C])[sp].[moe](T)[sp].[moe](G)[sp].[moe]( |
| | A)[sp].[moe](A)[sp].[moe](T)[sp].[moe](T)[sp].[moe]([m5C])[sp].[moe]( |
| | T)[sp].[moe](T)[sp].[moe](T)[sp].[moe]([m5C])[sp].[moe](A)[sp].[moe]( |
| | A)[sp].[moe]([m5C])}$$$$V2.0 |
| 1222 | RNA1{[moe]([m5C])[sp].[moe](T)[sp].[moe](G)[sp].[moe](A)[sp].[moe]( |
| | A)[sp].[moe](T)[sp].[moe](T)[sp].[moe]([m5C])[sp].[moe](T)[sp].[moe](T |
| | )[sp].[moe](T)[sp].[moe]([m5C])[sp].[moe](A)[sp].[moe](A)[sp].[moe]([m |
| | 5C])[sp].[moe](T)}$$$$V2.0 |
| 1223 | RNA1{[moe](T)[sp].[moe](G)[sp].[moe](A)[sp].[moe](A)[sp].[moe](T)[s |
| | p].[moe](T)[sp].[moe]([m5C])[sp].[moe](T)[sp].[moe](T)[sp].[moe](T)[sp |
| | ].[moe]([m5C])[sp].[moe](A)[sp].[moe](A)[sp].[moe]([m5C])[sp].[moe](T |
| | )[sp].[moe](A)}$$$$V2.0 |
| 1224 | RNA1{[moe](G)[sp].[moe](A)[sp].[moe](A)[sp].[moe](T)[sp].[moe](T)[s |
| | p].[moe]([m5C])[sp].[moe](T)[sp].[moe](T)[sp].[moe](T)[sp].[moe]([m5C |
| | ])[sp].[moe](A)[sp].[moe](A)[sp].[moe]([m5C])[sp].[moe](T)[sp].[moe](A |
| | )[sp].[moe](G)}$$$$V2.0 |
| 1225 | RNA1{[moe](A)[sp].[moe](A)[sp].[moe](T)[sp].[moe](T)[sp].[moe]([m5 |
| | C])[sp].[moe](T)[sp].[moe](T)[sp].[moe](T)[sp].[moe]([m5C])[sp].[moe]( |
| | A)[sp].[moe](A)[sp].[moe]([m5C])[sp].[moe](T)[sp].[moe](A)[sp].[moe]( |
| | G)[sp].[moe](A)}$$$$V2.0 |
| 1226 | RNA1{[lna]([m5C])[sp].[moe](T)[sp].[moe](G)[sp].[moe](A)[sp].[moe]( |
| | A)[sp].[moe](T)[sp].[moe](T)[sp].[moe]([m5C])[sp].[moe](T)[sp].[moe](T |
| | )[sp].[moe](T)[sp].[moe]([m5C])[sp].[moe](A)[sp].[moe](A)[sp].[moe]([m |
| | 5C])[sp].[lna](T)}$$$$V2.0 |
| 1227 | RNA1{[lna](T)[sp].[moe](G)[sp].[moe](A)[sp].[moe](A)[sp].[moe](T)[sp] |
| | .[moe](T)[sp].[moe]([m5C])[sp].[moe](T)[sp].[moe](T)[sp].[moe](T)[sp].[ |
| | moe]([m5C])[sp].[moe](A)[sp].[moe](A)[sp].[moe]([m5C])[sp].[moe](T)[ |
| | sp].[lna](A)}$$$$V2.0 |
| 1228 | RNA1{[lna](G)[sp].[moe](A)[sp].[moe](A)[sp].[moe](T)[sp].[moe](T)[sp] |
| | .[moe]([m5C])[sp].[moe](T)[sp].[moe](T)[sp].[moe](T)[sp].[moe]([m5C]) |
| | [sp].[moe](A)[sp].[moe](A)[sp].[moe]([m5C])[sp].[moe](T)[sp].[moe](A)[ |
| | sp].[lna](G)}$$$$V2.0 |
| 1229 | RNA1{[lna](A)[sp].[moe](A)[sp].[moe](T)[sp].[moe](T)[sp].[moe]([m5C] |
| | )[sp].[moe](T)[sp].[moe](T)[sp].[moe](T)[sp].[moe]([m5C])[sp].[moe](A) |
| | [sp].[moe](A)[sp].[moe]([m5C])[sp].[moe](T)[sp].[moe](A)[sp].[moe](G)[ |
| | sp].[lna](A)}$$$$V2.0 |
| 1230 | RNA1{m(C)[sp].m(U)[sp].m(G)[sp].m(A)[sp].m(A)[sp].m(U)[sp].m(U)[s |
| | p].m(C)[sp].m(U)[sp].m(U)[sp].m(U)[sp].m(C)[sp].m(A)[sp].m(A)[sp].m( |
| | C)[sp].m(U)[sp].m(A)[sp].m(G)}$$$$V2.0 |
| 1231 | RNA1{[lna]([m5C])[sp].m(U)[sp].m(G)[sp].m(A)[sp].m(A)[sp].m(U)[sp]. |
| | m(U)[sp].m(C)[sp].m(U)[sp].m(U)[sp].m(U)[sp].m(C)[sp].m(A)[sp].m(A) |
| | [sp].m(C)[sp].m(U)[sp].m(A)[sp].m(G)}$$$$V2.0 |
| 1232 | RNA1{m(C)[sp].m(U)[sp].m(G)[sp].m(A)[sp].m(A)[sp].m(U)[sp].m(U)[s |
| | p].m(C)[sp].m(U)[sp].m(U)[sp].m(U)[sp].m(C)[sp].m(A)[sp].m(A)[sp].m( |
| | C)[sp].m(U)[sp].m(A)[sp].[lna](G)}$$$$V2.0 |
| 1233 | RNA1{[lna]([m5C])[sp].m(U)[sp].m(G)[sp].m(A)[sp].m(A)[sp].m(U)[sp]. |
| | m(U)[sp].m(C)[sp].m(U)[sp].m(U)[sp].m(U)[sp].m(C)[sp].m(A)[sp].m(A) |
| | [sp].m(C)[sp].m(U)[sp].m(A)[sp].[lna](G)}$$$$V2.0 |
| 1234 | RNA1{[lna]([m5C])[sp].[lna](T)[sp].m(G)[sp].m(A)[sp].m(A)[sp].m(U)[s |
| | p].m(U)[sp].m(C)[sp].m(U)[sp].m(U)[sp].m(U)[sp].m(C)[sp].m(A)[sp].m( |
| | A)[sp].m(C)[sp].m(U)[sp].[lna](A)[sp].[lna](G)}$$$$V2.0 |
| 1235 | RNA1{m(U)[sp].m(C)[sp].m(U)[sp].m(G)[sp].m(A)[sp].m(A)[sp].m(U)[s |
| | p].m(U)[sp].m(C)[sp].m(U)[sp].m(U)[sp].m(U)[sp].m(C)[sp].m(A)[sp].m( |
| | A)[sp].m(C)[sp].m(U)[sp].m(A)[sp].m(G)[sp].m(A)}$$$$V2.0 |
| 1236 | RNA1{[lna](T)[sp].m(C)[sp].m(U)[sp].m(G)[sp].m(A)[sp].m(A)[sp].m(U) |
| | [sp].m(U)[sp].m(C)[sp].m(U)[sp].m(U)[sp].m(U)[sp].m(C)[sp].m(A)[sp]. |
| | m(A)[sp].m(C)[sp].m(U)[sp].m(A)[sp].m(G)[sp].m(A)}$$$$V2.0 |
| 1237 | RNA1{m(U)[sp].m(C)[sp].m(U)[sp].m(G)[sp].m(A)[sp].m(A)[sp].m(U)[s |
| | p].m(U)[sp].m(C)[sp].m(U)[sp].m(U)[sp].m(U)[sp].m(C)[sp].m(A)[sp].m( |
| | A)[sp].m(C)[sp].m(U)[sp].m(A)[sp].m(G)[sp].[lna](A)}$$$$V2.0 |
| 1238 | RNA1{[lna](T)[sp].m(C)[sp].m(U)[sp].m(G)[sp].m(A)[sp].m(A)[sp].m(U) |
| | [sp].m(U)[sp].m(C)[sp].m(U)[sp].m(U)[sp].m(U)[sp].m(C)[sp].m(A)[sp]. |
| | m(A)[sp].m(C)[sp].m(U)[sp].m(A)[sp].m(G)[sp].[lna](A)}$$$$V2.0 |
| 1239 | RNA1{[lna](T)[sp].[lna]([m5C])[sp].m(U)[sp].m(G)[sp].m(A)[sp].m(A)[s |
| | p].m(U)[sp].m(U)[sp].m(C)[sp].m(U)[sp].m(U)[sp].m(U)[sp].m(C)[sp].m( |
| | A)[sp].m(A)[sp].m(C)[sp].m(U)[sp].m(A)[sp].[lna](G)[sp].[lna](A)}$$$$ |
| | V2.0 |
| 1240 | RNA1{[moe]([m5C])[sp].m(U)[sp].m(G)[sp].m(A)[sp].m(A)[sp].[moe](T) |
| | [sp].[moe](T)[sp].[moe]([m5C])[sp].[moe](T)[sp].[moe](T)[sp].[moe](T)[s |
| | p].[moe]([m5C])[sp].[moe](A)[sp].[moe](A)[sp].[moe]([m5C])[sp].[moe]( |
| | T)[sp].[moe](A)[sp].[moe](G)}$$$$V2.0 |
| 1241 | RNA1{[moe]([m5C])[sp].[moe](T)[sp].[moe](G)[sp].[moe](A)[sp].[moe]( |
| | A)[sp].[moe](T)[sp].[moe](T)[sp].[moe]([m5C])[sp].[moe](T)[sp].m(U)[s |
| | p].m(U)[sp].m(C)[sp].m(A)[sp].[moe](A)[sp].[moe]([m5C])[sp].[moe](T)[ |
| | sp].[moe](A)[sp].[moe](G)}$$$$V2.0 |
| 1242 | RNA1{[moe]([m5C])[sp].m(U)[sp].m(G)[sp].m(A)[sp].m(A)[sp].[moe](T) |
| | [sp].[moe](T)[sp].[moe]([m5C])[sp].[moe](T)[sp].m(U)[sp].m(U)[sp].m(C |
| | )[sp].m(A)[sp].[moe](A)[sp].[moe]([m5C])[sp].[moe](T)[sp].[moe](A)[sp] |
| | .[moe](G)}$$$$V2.0 |
| 1243 | RNA1{[moe]([m5C])[sp].m(U)[sp].m(G)[sp].m(A)[sp].m(A)[sp].m(U)[sp |
| | ].m(U)[sp].m(C)[sp].m(U)[sp].m(U)[sp].m(U)[sp].m(C)[sp].m(A)[sp].[mo |
| | e](A)[sp].[moe]([m5C])[sp].[moe](T)[sp].[moe](A)[sp].[moe](G)}$$$$V2 |
| | .0 |
| 1244 | RNA1{[lna]([m5C])[sp].m(U)[sp].m(G)[sp].m(A)[sp].m(A)[sp].[moe](T)[ |
| | sp].[moe](T)[sp].[moe]([m5C])[sp].[moe](T)[sp].[moe](T)[sp].[moe](T)[s |
| | p].[moe]([m5C])[sp].[moe](A)[sp].[moe](A)[sp].[moe]([m5C])[sp].[moe]( |
| | T)[sp].[moe](A)[sp].[lna](G)}$$$$V2.0 |
| 1245 | RNA1{[lna]([m5C])[sp].[moe](T)[sp].[moe](G)[sp].[moe](A)[sp].[moe]( |
| | A)[sp].[moe](T)[sp].[moe](T)[sp].[moe]([m5C])[sp].[moe](T)[sp].m(U)[s |
| | p].m(U)[sp].m(C)[sp].m(A)[sp].[moe](A)[sp].[moe]([m5C])[sp].[moe](T)[ |
| | sp].[moe](A)[sp].[lna](G)}$$$$V2.0 |
| 1246 | RNA1{[lna]([m5C])[sp].m(U)[sp].m(G)[sp].m(A)[sp].m(A)[sp].[moe](T)[ |
| | sp].[moe](T)[sp].[moe]([m5C])[sp].[moe](T)[sp].m(U)[sp].m(U)[sp].m(C) |
| | [sp].m(A)[sp].[moe](A)[sp].[moe]([m5C])[sp].[moe](T)[sp].[moe](A)[sp]. |
| | [lna](G)}$$$$V2.0 |
| 1247 | RNA1{[lna]([m5C])[sp].m(U)[sp].m(G)[sp].m(A)[sp].m(A)[sp].m(U)[sp]. |
| | m(U)[sp].m(C)[sp].m(U)[sp].m(U)[sp].m(U)[sp].m(C)[sp].m(A)[sp].[moe] |
| | (A)[sp].[moe]([m5C])[sp].[moe](T)[sp].[moe](A)[sp].[lna](G)}$$$$V2.0 |
| 1248 | RNA1{[moe]([m5C])[sp].[moe](T)[sp].[lna](G)[sp].[moe](A)[sp].[moe]( |
| | A)[sp].[moe](T)[sp].[moe](T)[sp].[moe]([m5C])[sp].[moe](T)[sp].[moe](T |
| | )[sp].[moe](T)[sp].[lna]([m5C])[sp].[moe](A)[sp].[moe](A)[sp].[moe]([m5 |
| | C])[sp].[moe](T)[sp].[moe](A)[sp].[moe](G)}$$$$V2.0 |
| 1249 | RNA1{[moe]([m5C])[sp].[lna](T)[sp].[lna](G)[sp].[moe](A)[sp].[moe](A) |
| | [sp].[moe](T)[sp].[moe](T)[sp].[moe]([m5C])[sp].[moe](T)[sp].[moe](T)[s |
| | p].[moe](T)[sp].[moe]([m5C])[sp].[moe](A)[sp].[moe](A)[sp].[moe]([m5 |
| | C])[sp].[moe](T)[sp].[moe](A)[sp].[moe](G)}$$$$V2.0 |
| 1250 | RNA1{[moe]([m5C])[sp].[moe](T)[sp].[moe](G)[sp].[moe](A)[sp].[moe]( |
| | A)[sp].[moe](T)[sp].[moe](T)[sp].[moe]([m5C])[sp].[moe](T)[sp].[moe](T |
| | )[sp].[moe](T)[sp].[lna]([m5C])[sp].[lna](A)[sp].[moe](A)[sp].[moe]([m5 |
| | C])[sp].[moe](T)[sp].[moe](A)[sp].[moe](G)}$$$$V2.0 |
| 1251 | RNA1{[moe]([m5C])[sp].[lna](T)[sp].[lna](G)[sp].[moe](A)[sp].[moe](A) |
| | [sp].[moe](T)[sp].[moe](T)[sp].[moe]([m5C])[sp].[moe](T)[sp].[moe](T)[s |
| | p].[moe](T)[sp].[lna]([m5C])[sp].[lna](A)[sp].[moe](A)[sp].[moe]([m5C]) |
| | [sp].[moe](T)[sp].[moe](A)[sp].[moe](G)}$$$$V2.0 |
| 1252 | RNA1{[moe]([m5C])[sp].[moe](T)[sp].[moe](G)[sp].[lna](A)[sp].[lna](A) |
| | [sp].[moe](T)[sp].[moe](T)[sp].[moe]([m5C])[sp].[moe](T)[sp].[lna](T)[sp |
| | ].[lna](T)[sp].[moe]([m5C])[sp].[moe](A)[sp].[moe](A)[sp].[moe]([m5C]) |
| | [sp].[moe](T)[sp].[moe](A)[sp].[moe](G)}$$$$V2.0 |
| 1253 | RNA1{[moe]([m5C])[sp].[moe](T)[sp].m(G)[sp].m(A)[sp].m(A)[sp].m(U) |
| | [sp].m(U)[sp].m(C)[sp].[moe](T)[sp].[moe](T)[sp].[moe](T)[sp].[moe]([m |
| | 5C])[sp].[moe](A)[sp].[moe](A)[sp].[moe]([m5C])[sp].[moe](T)[sp].[moe |
| | ](A)[sp].[moe](G)}$$$$V2.0 |
| 1254 | RNA1{[moe]([m5C])[sp].[moe](T)[sp].[lna](G)[sp].[lna](A)[sp].[lna](A)[ |
| | sp].[lna](T)[sp].[lna](T)[sp].[lna]([m5C])[sp].[moe](T)[sp].[moe](T)[sp].[ |
| | moe](T)[sp].[moe]([m5C])[sp].[moe](A)[sp].[moe](A)[sp].[moe]([m5C])[ |
| | sp].[moe](T)[sp].[moe](A)[sp].[moe](G)}$$$$V2.0 |
| 1255 | RNA1{[lna]([m5C])[sp].[moe](T)[sp].m(G)[sp].m(A)[sp].m(A)[sp].m(U)[ |
| | sp].m(U)[sp].m(C)[sp].[moe](T)[sp].[moe](T)[sp].[moe](T)[sp].[moe]([m5 |
| | C])[sp].[moe](A)[sp].[moe](A)[sp].[moe]([m5C])[sp].[moe](T)[sp].[moe]( |
| | A)[sp].[lna](G)}$$$$V2.0 |
| 1256 | RNA1{[lna]([m5C])[sp].[moe](T)[sp].[moe](G)[sp].[moe](A)[sp].[moe]( |
| | A)[sp].[moe](T)[sp].[moe](T)[sp].[lna]([m5C])[sp].[moe](T)[sp].[moe](T) |
| | [sp].[moe](T)[sp].[moe]([m5C])[sp].[moe](A)[sp].[moe](A)[sp].[moe]([m |
| | 5C])[sp].[moe](T)[sp].[moe](A)[sp].[lna](G)}$$$$V2.0 |
| 1257 | RNA1{[moe]([m5C])[sp].[moe](T)[sp].[lna](G)[sp].m(A)[sp].m(A)[sp].m |
| | (U)[sp].m(U)[sp].[lna]([m5C])[sp].[moe](T)[sp].[moe](T)[sp].[moe](T)[sp |
| | ].[moe]([m5C])[sp].[moe](A)[sp].[moe](A)[sp].[moe]([m5C])[sp].[moe](T |
| | )[sp].[moe](A)[sp].[moe](G)}$$$$V2.0 |
| 1258 | RNA1{[lna]([m5C])[sp].[moe](T)[sp].[moe](G)[sp].[moe](A)[sp].[lna](A) |
| | [sp].[lna](T)[sp].[moe](T)[sp].[moe]([m5C])[sp].[moe](T)[sp].[moe](T)[sp |
| | ].[moe](T)[sp].[moe]([m5C])[sp].[moe](A)[sp].[moe](A)[sp].[moe]([m5C] |
| | )[sp].[moe](T)[sp].[moe](A)[sp].[lna](G)}$$$$V2.0 |
| 1259 | RNA1{[moe]([m5C])[sp].[moe](T)[sp].[lna](G)[sp].[moe](A)[sp].[moe]( |
| | A)[sp].[moe](T)[sp].[moe](T)[sp].[lna]([m5C])[sp].[moe](T)[sp].[moe](T) |
| | [sp].[moe](T)[sp].[moe]([m5C])[sp].[moe](A)[sp].[moe](A)[sp].[moe]([m |
| | 5C])[sp].[moe](T)[sp].[moe](A)[sp].[moe](G)}$$$$V2.0 |
| 1260 | RNA1{[lna]([m5C])[sp].[moe](T)[sp].m(G)[sp].m(A)[sp].[moe](A)[sp].[ |
| | moe](T)[sp].m(U)[sp].m(C)[sp].[moe](T)[sp].[moe](T)[sp].[moe](T)[sp].[ |
| | moe]([m5C])[sp].[moe](A)[sp].[moe](A)[sp].[moe]([m5C])[sp].[moe](T)[ |
| | sp].[moe](A)[sp].[lna](G)}$$$$V2.0 |
| 1261 | RNA1{[moe](A)[sp].[moe](A)[sp].[moe](T)[sp].[moe](T)[sp].[moe]([m5 |
| | C])[sp].[moe](T)[sp].[moe](T)[sp].[moe](T)[sp].[moe]([m5C])[sp].[moe]( |
| | A)[sp].[moe](A)[sp].m(C)[sp].m(U)[sp].m(A)[sp].m(G)}$$$$V2.0 |
| 1262 | RNA1{[lna](A)[sp].[moe](A)[sp].[moe](T)[sp].[moe](T)[sp].[moe]([m5C] |
| | )[sp].[moe](T)[sp].[moe](T)[sp].[moe](T)[sp].[moe]([m5C])[sp].[moe](A) |
| | [sp].[moe](A)[sp].m(C)[sp].m(U)[sp].m(A)[sp].[lna](G)}$$$$V2.0 |
| 1263 | RNA1{[lna](A)[sp].[moe](A)[sp].[moe](T)[sp].[moe](T)[sp].[moe]([m5C] |
| | )[sp].[moe](T)[sp].[moe](T)[sp].[moe](T)[sp].[moe]([m5C])[sp].[moe](A) |
| | [sp].[moe](A)[sp].m(C)[sp].m(U)[sp].[moe](A)[sp].[lna](G)}$$$$V2.0 |
| 1264 | RNA1{[lna](A)[sp].[moe](A)[sp].[moe](T)[sp].[moe](T)[sp].[moe]([m5C] |
| | )[sp].[moe](T)[sp].[moe](T)[sp].[moe](T)[sp].[moe]([m5C])[sp].[moe](A) |
| | [sp].[moe](A)[sp].m(C)[sp].m(U)[sp].[lna](A)[sp].[lna](G)}$$$$V2.0 |
| 1265 | RNA1{[lna](A)[sp].[moe](A)[sp].[moe](T)[sp].[moe](T)[sp].[moe]([m5C] |
| | )[sp].[moe](T)[sp].[moe](T)[sp].[moe](T)[sp].[moe]([m5C])[sp].[moe](A) |
| | [sp].[moe](A)[sp].m(C)[sp].[moe](T)[sp].[moe](A)[sp].[lna](G)}$$$$V2.0 |
| 1266 | RNA1{[moe](A)[sp].[moe](A)[sp].[moe](T)[sp].[moe](T)[sp].[moe]([m5 |
| | C])[sp].[moe](T)[sp].[moe](T)[sp].[moe](T)[sp].[moe]([m5C])[sp].[moe]( |
| | A)[sp].[moe](A)[sp].[lna]([m5C])[sp].[lna](T)[sp].[lna](A)[sp].[lna](G)}$ |
| | $$$V2.0 |
| 1267 | RNA1{[moe](A)[sp].[moe](A)[sp].[moe](T)[sp].[moe](T)[sp].[moe]([m5 |
| | C])[sp].[moe](T)[sp].[moe](T)[sp].[moe](T)[sp].[moe]([m5C])[sp].[moe]( |
| | A)[sp].[moe](A)[sp].[lna]([m5C])[sp].[lna](T)[sp].[moe](A)[sp].[moe](G) |
| | }$$$$V2.0 |
| 1268 | RNA1{[lna](A)[sp].[moe](A)[sp].[moe](T)[sp].[moe](T)[sp].[moe]([m5C] |
| | )[sp].[moe](T)[sp].[moe](T)[sp].[moe](T)[sp].[moe]([m5C])[sp].[moe](A) |
| | [sp].[moe](A)[sp].[lna]([m5C])[sp].[lna](T)[sp].[moe](A)[sp].[lna](G)}$$ |
| | $$V2.0 |
| 1269 | RNA1{[lna](A)[sp].[moe](A)[sp].[moe](T)[sp].[moe](T)[sp].[moe]([m5C] |
| | )[sp].[moe](T)[sp].[moe](T)[sp].[moe](T)[sp].[moe]([m5C])[sp].[moe](A) |
| | [sp].[moe](A)[sp].[lna]([m5C])[sp].[moe](T)[sp].[moe](A)[sp].[lna](G)}$ |
| | $$$V2.0 |
| 1270 | RNA1{[moe](A)[sp].m(A)[sp].m(U)[sp].m(U)[sp].m(C)[sp].m(U)[sp].m( |
| | U)[sp].m(U)[sp].m(C)[sp].m(A)[sp].m(A)[sp].m(C)[sp].m(U)[sp].m(A)[sp |
| | ].[moe](G)}$$$$V2.0 |
| 1271 | RNA1{[lna](A)[sp].m(A)[sp].m(U)[sp].m(U)[sp].m(C)[sp].m(U)[sp].m(U |
| | )[sp].m(U)[sp].m(C)[sp].m(A)[sp].m(A)[sp].m(C)[sp].m(U)[sp].m(A)[sp]. |
| | [lna](G)}$$$$V2.0 |
| 1272 | RNA1{[lna](A)[sp].[lna](A)[sp].m(U)[sp].m(U)[sp].m(C)[sp].m(U)[sp].m |
| | (U)[sp].m(U)[sp].m(C)[sp].m(A)[sp].m(A)[sp].m(C)[sp].m(U)[sp].[lna](A |
| | )[sp].[lna](G)}$$$$V2.0 |
| 1273 | RNA1{[lna](A)[sp].[lna](A)[sp].m(U)[sp].m(U)[sp].m(C)[sp].m(U)[sp].m |
| | (U)[sp].m(U)[sp].m(C)[sp].m(A)[sp].m(A)[sp].m(C)[sp].m(U)[sp].m(A)[s |
| | p].[lna](G)}$$$$V2.0 |
| 1274 | RNA1{[lna](A)[sp].m(A)[sp].m(U)[sp].m(U)[sp].m(C)[sp].m(U)[sp].m(U |
| | )[sp].m(U)[sp].m(C)[sp].m(A)[sp].m(A)[sp].m(C)[sp].m(U)[sp].[lna](A)[s |
| | p].[lna](G)}$$$$V2.0 |
| 1275 | RNA1{[lna](A)[sp].[lna](A)[sp].[lna](T)[sp].m(U)[sp].m(C)[sp].m(U)[sp]. |
| | m(U)[sp].m(U)[sp].m(C)[sp].m(A)[sp].m(A)[sp].m(C)[sp].m(U)[sp].[lna]( |
| | A)[sp].[lna](G)}$$$$V2.0 |
| 1276 | RNA1{[lna](A)[sp].[lna](A)[sp].m(U)[sp].m(U)[sp].m(C)[sp].m(U)[sp].m |
| | (U)[sp].m(U)[sp].m(C)[sp].m(A)[sp].m(A)[sp].m(C)[sp].[lna](T)[sp].[lna] |
| | (A)[sp].[lna](G)}$$$$V2.0 |
| 1277 | RNA1{[lna](A)[sp].m(A)[sp].m(U)[sp].m(U)[sp].m(C)[sp].m(U)[sp].m(U |
| | )[sp].m(U)[sp].[lna]([m5C])[sp].m(A)[sp].m(A)[sp].m(C)[sp].m(U)[sp].[ln |
| | a](A)[sp].[lna](G)}$$$$V2.0 |
| 1278 | RNA1{[lna](A)[sp].m(A)[sp].m(U)[sp].m(U)[sp].[lna]([m5C])[sp].m(U)[s |
| | p].m(U)[sp].m(U)[sp].m(C)[sp].m(A)[sp].m(A)[sp].m(C)[sp].m(U)[sp].[ln |
| | a](A)[sp].[lna](G)}$$$$V2.0 |
| 1279 | RNA1{[fl2r](C)[sp].[moe](T)[sp].[moe](G)[sp].[moe](A)[sp].[moe](A)[sp |
| | ].[moe](T)[sp].[moe](T)[sp].[moe]([m5C])[sp].[moe](T)[sp].[moe](T)[sp]. |
| | [moe](T)[sp].[moe]([m5C])[sp].[moe](A)[sp].[moe](A)[sp].[moe]([m5C])[ |
| | sp].[moe](T)[sp].[moe](A)[sp].[fl2r](G)}$$$$V2.0 |
| 1280 | RNA1{[fl2r](C)[sp].[fl2r](U)[sp].[moe](G)[sp].[moe](A)[sp].[moe](A)[sp |
| | ].[moe](T)[sp].[moe](T)[sp].[moe]([m5C])[sp].[moe](T)[sp].[moe](T)[sp]. |
| | [moe](T)[sp].[moe]([m5C])[sp].[moe](A)[sp].[moe](A)[sp].[moe]([m5C])[ |
| | sp].[moe](T)[sp].[fl2r](A)[sp].[fl2r](G)}$$$$V2.0 |
| 1281 | RNA1{[fl2r](C)[sp].[fl2r](U)[sp].[fl2r](G)[sp].[moe](A)[sp].[moe](A)[sp]. |
| | [moe](T)[sp].[moe](T)[sp].[moe]([m5C])[sp].[moe](T)[sp].[moe](T)[sp].[ |
| | moe](T)[sp].[moe]([m5C])[sp].[moe](A)[sp].[moe](A)[sp].[moe]([m5C])[ |
| | sp].[fl2r](U)[sp].[fl2r](A)[sp].[fl2r](G)}$$$$V2.0 |
| 1282 | RNA1{[fl2r](C)[sp].[fl2r](U)[sp].[fl2r](G)[sp].[fl2r](A)[sp].[moe](A)[sp]. |
| | [moe](T)[sp].[moe](T)[sp].[moe]([m5C])[sp].[moe](T)[sp].[moe](T)[sp].[ |
| | moe](T)[sp].[moe]([m5C])[sp].[moe](A)[sp].[moe](A)[sp].[fl2r](C)[sp].[fl |
| | 2r](U)[sp].[fl2r](A)[sp].[fl2r](G)}$$$$V2.0 |
| 1283 | RNA1{[fl2r](C)[sp].[fl2r](U)[sp].[fl2r](G)[sp].[fl2r](A)[sp].[fl2r](A)[sp].[ |
| | moe](T)[sp].[moe](T)[sp].[moe]([m5C])[sp].[moe](T)[sp].[moe](T)[sp].[ |
| | moe](T)[sp].[moe]([m5C])[sp].[moe](A)[sp].[fl2r](A)[sp].[fl2r](C)[sp].[fl |
| | 2r](U)[sp].[fl2r](A)[sp].[fl2r](G)}$$$$V2.0 |
| 1284 | RNA1{[fl2r](C)[sp].[fl2r](U)[sp].[fl2r](G)[sp].[fl2r](A)[sp].[fl2r](A)[sp].[ |
| | fl2r](U)[sp].[moe](T)[sp].[moe]([m5C])[sp].[moe](T)[sp].[moe](T)[sp].[m |
| | oe](T)[sp].[moe]([m5C])[sp].[fl2r](A)[sp].[fl2r](A)[sp].[fl2r](C)[sp].[fl2r] |
| | (U)[sp].[fl2r](A)[sp].[fl2r](G)}$$$$V2.0 |
| 1285 | RNA1{[fl2r](C)[sp].[fl2r](U)[sp].[fl2r](G)[sp].[fl2r](A)[sp].[fl2r](A)[sp].[ |
| | fl2r](U)[sp].[fl2r](U)[sp].[moe]([m5C])[sp].[moe](T)[sp].[moe](T)[sp].[m |
| | oe](T)[sp].[fl2r](C)[sp].[fl2r](A)[sp].[fl2r](A)[sp].[fl2r](C)[sp].[fl2r](U)[s |
| | p].[fl2r](A)[sp].[fl2r](G)}$$$$V2.0 |
| 1286 | RNA1{[fl2r](C)[sp].[fl2r](U)[sp].[fl2r](G)[sp].[fl2r](A)[sp].[fl2r](A)[sp].[ |
| | fl2r](U)[sp].[fl2r](U)[sp].[fl2r](C)[sp].[moe](T)[sp].[moe](T)[sp].[fl2r](U) |
| | [sp].[fl2r](C)[sp].[fl2r](A)[sp].[fl2r](A)[sp].[fl2r](C)[sp].[fl2r](U)[sp].[fl2r |
| | ](A)[sp].[fl2r](G)}$$$$V2.0 |
| 1287 | RNA1{[fl2r](C)[sp].[fl2r](U)[sp].[fl2r](G)[sp].[fl2r](A)[sp].[fl2r](A)[sp].[ |
| | fl2r](U)[sp].[fl2r](U)[sp].[fl2r](C)[sp].[fl2r](U)[sp].[fl2r](U)[sp].[fl2r](U)[ |
| | sp].[fl2r](C)[sp].[fl2r](A)[sp].[fl2r](A)[sp].[fl2r](C)[sp].[fl2r](U)[sp].[fl2r] |
| | (A)[sp].[fl2r](G)}$$$$V2.0 |
| 1288 | RNA1{[fl2r](C)[sp].[moe](T)[sp].[fl2r](G)[sp].[moe](A)[sp].[fl2r](A)[sp]. |
| | [moe](T)[sp].[fl2r](U)[sp].[moe]([m5C])[sp].[fl2r](U)[sp].[moe](T)[sp].[fl |
| | 2r](U)[sp].[moe]([m5C])[sp].[fl2r](A)[sp].[moe](A)[sp].[fl2r](C)[sp].[moe |
| | ](T)[sp].[fl2r](A)[sp].[moe](G)}$$$$V2.0 |
| 1289 | RNA1{[moe]([m5C])[sp].[fl2r](U)[sp].[moe](G)[sp].[fl2r](A)[sp].[moe]( |
| | A)[sp].[fl2r](U)[sp].[moe](T)[sp].[fl2r](C)[sp].[moe](T)[sp].[fl2r](U)[sp].[ |
| | moe](T)[sp].[fl2r](C)[sp].[moe](A)[sp].[fl2r](A)[sp].[moe]([m5C])[sp].[fl |
| | 2r](U)[sp].[moe](A)[sp].[fl2r](G)}$$$$V2.0 |
| 1290 | RNA1{[fl2r](C)[sp].[fl2r](U)[sp].[moe](G)[sp].[moe](A)[sp].[fl2r](A)[sp]. |
| | [fl2r](U)[sp].[moe](T)[sp].[moe]([m5C])[sp].[fl2r](U)[sp].[fl2r](U)[sp].[m |
| | oe](T)[sp].[moe]([m5C])[sp].[fl2r](A)[sp].[fl2r](A)[sp].[moe]([m5C])[sp]. |
| | [moe](T)[sp].[fl2r](A)[sp].[fl2r](G)}$$$$V2.0 |
| 1291 | RNA1{[fl2r](C)[sp].[fl2r](U)[sp].[fl2r](G)[sp].[moe](A)[sp].[moe](A)[sp]. |
| | [moe](T)[sp].[fl2r](U)[sp].[fl2r](C)[sp].[fl2r](U)[sp].[moe](T)[sp].[moe]( |
| | T)[sp].[moe]([m5C])[sp].[fl2r](A)[sp].[fl2r](A)[sp].[fl2r](C)[sp].[moe](T)[ |
| | sp].[moe](A)[sp].[moe](G)}$$$$V2.0 |
| 1292 | RNA1{[moe]([m5C])[sp].[moe](T)[sp].[moe](G)[sp].[moe](A)[sp].[moe]( |
| | A)[sp].[moe](T)[sp].[moe](T)[sp].[moe]([m5C])[sp].[fl2r](U)[sp].[fl2r](U) |
| | [sp].[moe](T)[sp].[moe]([m5C])[sp].[moe](A)[sp].[moe](A)[sp].[moe]([m |
| | 5C])[sp].[moe](T)[sp].[moe](A)[sp].[moe](G)}$$$$V2.0 |
| 1293 | RNA1{[moe]([m5C])[sp].[moe](T)[sp].[moe](G)[sp].[moe](A)[sp].[moe]( |
| | A)[sp].[moe](T)[sp].[moe](T)[sp].[fl2r](C)[sp].[fl2r](U)[sp].[fl2r](U)[sp].[ |
| | fl2r](U)[sp].[moe]([m5C])[sp].[moe](A)[sp].[moe](A)[sp].[moe]([m5C])[s |
| | p].[moe](T)[sp].[moe](A)[sp].[moe](G)}$$$$V2.0 |
| 1294 | RNA1{[moe]([m5C])[sp].[moe](T)[sp].[moe](G)[sp].[moe](A)[sp].[moe]( |
| | A)[sp].[moe](T)[sp].[fl2r](U)[sp].[fl2r](C)[sp].[fl2r](U)[sp].[fl2r](U)[sp].[ |
| | fl2r](U)[sp].[fl2r](C)[sp].[moe](A)[sp].[moe](A)[sp].[moe]([m5C])[sp].[m |
| | oe](T)[sp].[moe](A)[sp].[moe](G)}$$$$V2.0 |
| 1295 | RNA1{[moe]([m5C])[sp].[moe](T)[sp].[moe](G)[sp].[moe](A)[sp].[moe]( |
| | A)[sp].[fl2r](U)[sp].[fl2r](U)[sp].[fl2r](C)[sp].[fl2r](U)[sp].[fl2r](U)[sp].[f |
| | l2r](U)[sp].[fl2r](C)[sp].[fl2r](A)[sp].[moe](A)[sp].[moe]([m5C])[sp].[mo |
| | e](T)[sp].[moe](A)[sp].[moe](G)}$$$$V2.0 |
| 1296 | RNA1{[moe]([m5C])[sp].[moe](T)[sp].[moe](G)[sp].[moe](A)[sp].[fl2r]( |
| | A)[sp].[fl2r](U)[sp].[fl2r](U)[sp].[fl2r](C)[sp].[fl2r](U)[sp].[fl2r](U)[sp].[f |
| | l2r](U)[sp].[fl2r](C)[sp].[fl2r](A)[sp].[fl2r](A)[sp].[moe]([m5C])[sp].[moe |
| | ](T)[sp].[moe](A)[sp].[moe](G)}$$$$V2.0 |
| 1297 | RNA1{[moe]([m5C])[sp].[moe](T)[sp].[moe](G)[sp].[fl2r](A)[sp].[fl2r](A |
| | )[sp].[fl2r](U)[sp].[fl2r](U)[sp].[fl2r](C)[sp].[fl2r](U)[sp].[fl2r](U)[sp].[fl2 |
| | r](U)[sp].[fl2r](C)[sp].[fl2r](A)[sp].[fl2r](A)[sp].[fl2r](C)[sp].[moe](T)[sp |
| | ].[moe](A)[sp].[moe](G)}$$$$V2.0 |
| 1298 | RNA1{[lna](T)[sp].[moe](T)[sp].[moe]([m5C])[sp].[moe](T)[sp].[moe](G |
| | )[sp].[moe](A)[sp].[moe](A)[sp].[moe](T)[sp].[moe](T)[sp].[moe]([m5C]) |
| | [sp].[moe](T)[sp].[moe](T)[sp].[moe](T)[sp].[moe]([m5C])[sp].[moe](A)[ |
| | sp].[moe](A)[sp].[moe]([m5C])[sp].[lna](T)}$$$$V2.0 |
| 1299 | RNA1{[lna](T)[sp].[lna](T)[sp].[moe]([m5C])[sp].[moe](T)[sp].[moe](G)[ |
| | sp].[moe](A)[sp].[moe](A)[sp].[moe](T)[sp].[moe](T)[sp].[moe]([m5C])[s |
| | p].[moe](T)[sp].[moe](T)[sp].[moe](T)[sp].[moe]([m5C])[sp].[moe](A)[sp |
| | ].[moe](A)[sp].[lna]([m5C])[sp].[lna](T)}$$$$V2.0 |
| 1300 | RNA1{[moe](A)[sp].[moe](T)[sp].[moe](T)[sp].[moe]([m5C])[sp].[moe]( |
| | T)[sp].[moe](G)[sp].[moe](A)[sp].[moe](A)[sp].[moe](T)[sp].[moe](T)[sp |
| | ].[moe]([m5C])[sp].[moe](T)[sp].[moe](T)[sp].[moe](T)[sp].[moe]([m5C] |
| | )[sp].[moe](A)[sp].[moe](A)[sp].[moe]([m5C])[sp].[moe](T)}$$$$V2.0 |
| 1301 | RNA1{[moe](G)[sp].[moe](A)[sp].[moe](T)[sp].[moe](T)[sp].[moe]([m5 |
| | C])[sp].[moe](T)[sp].[moe](G)[sp].[moe](A)[sp].[moe](A)[sp].[moe](T)[s |
| | p].[moe](T)[sp].[moe]([m5C])[sp].[moe](T)[sp].[moe](T)[sp].[moe](T)[sp |
| | ].[moe]([m5C])[sp].[moe](A)[sp].[moe](A)[sp].[moe]([m5C])[sp].[moe](T |
| | )}$$$$V2.0 |
| 1302 | RNA1{[moe](T)[sp].[moe](G)[sp].[moe](A)[sp].[moe](T)[sp].[moe](T)[sp |
| | ].[moe]([m5C])[sp].[moe](T)[sp].[moe](G)[sp].[moe](A)[sp].[moe](A)[sp] |
| | .[moe](T)[sp].[moe](T)[sp].[moe]([m5C])[sp].[moe](T)[sp].[moe](T)[sp].[ |
| | moe](T)[sp].[moe]([m5C])[sp].[moe](A)[sp].[moe](A)[sp].[moe]([m5C])[ |
| | sp].[moe](T)}$$$$V2.0 |
| 1303 | RNA1{[moe]([m5C])[sp].[moe](T)[sp].[moe](G)[sp].[moe](A)[sp].[moe]( |
| | T)[sp].[moe](T)[sp].[moe]([m5C])[sp].[moe](T)[sp].[moe](G)[sp].[moe]( |
| | A)[sp].[moe](A)[sp].[moe](T)[sp].[moe](T)[sp].[moe]([m5C])[sp].[moe]( |
| | T)[sp].[moe](T)[sp].[moe](T)[sp].[moe]([m5C])[sp].[moe](A)[sp].[moe]( |
| | A)[sp].[moe]([m5C])[sp].[moe](T)}$$$$V2.0 |
| 1304 | RNA1{[lna](A)[sp].[moe](T)[sp].[moe](T)[sp].[moe]([m5C])[sp].[moe](T |
| | )[sp].[moe](G)[sp].[moe](A)[sp].[moe](A)[sp].[moe](T)[sp].[moe](T)[sp]. |
| | [moe]([m5C])[sp].[moe](T)[sp].[moe](T)[sp].[moe](T)[sp].[moe]([m5C])[ |
| | sp].[moe](A)[sp].[moe](A)[sp].[lna]([m5C])}$$$$V2.0 |
| 1305 | RNA1{[lna](A)[sp].[lna](T)[sp].[moe](T)[sp].[moe]([m5C])[sp].[moe](T)[ |
| | sp].[moe](G)[sp].[moe](A)[sp].[moe](A)[sp].[moe](T)[sp].[moe](T)[sp].[ |
| | moe]([m5C])[sp].[moe](T)[sp].[moe](T)[sp].[moe](T)[sp].[moe]([m5C])[s |
| | p].[moe](A)[sp].[lna](A)[sp].[lna]([m5C])}$$$$V2.0 |
| 1306 | RNA1{[moe](G)[sp].[moe](A)[sp].[moe](T)[sp].[moe](T)[sp].[moe]([m5 |
| | C])[sp].[moe](T)[sp].[moe](G)[sp].[moe](A)[sp].[moe](A)[sp].[moe](T)[s |
| | p].[moe](T)[sp].[moe]([m5C])[sp].[moe](T)[sp].[moe](T)[sp].[moe](T)[sp |
| | ].[moe]([m5C])[sp].[moe](A)[sp].[moe](A)[sp].[moe]([m5C])}$$$$V2.0 |
| 1307 | RNA1{[moe](T)[sp].[moe](G)[sp].[moe](A)[sp].[moe](T)[sp].[moe](T)[sp |
| | ].[moe]([m5C])[sp].[moe](T)[sp].[moe](G)[sp].[moe](A)[sp].[moe](A)[sp] |
| | .[moe](T)[sp].[moe](T)[sp].[moe]([m5C])[sp].[moe](T)[sp].[moe](T)[sp].[ |
| | moe](T)[sp].[moe]([m5C])[sp].[moe](A)[sp].[moe](A)[sp].[moe]([m5C])} |
| | $$$$V2.0 |
| 1308 | RNA1{[moe]([m5C])[sp].[moe](T)[sp].[moe](G)[sp].[moe](A)[sp].[moe]( |
| | T)[sp].[moe](T)[sp].[moe]([m5C])[sp].[moe](T)[sp].[moe](G)[sp].[moe]( |
| | A)[sp].[moe](A)[sp].[moe](T)[sp].[moe](T)[sp].[moe]([m5C])[sp].[moe]( |
| | T)[sp].[moe](T)[sp].[moe](T)[sp].[moe]([m5C])[sp].[moe](A)[sp].[moe]( |
| | A)[sp].[moe]([m5C])}$$$$V2.0 |
| 1309 | RNA1{[moe](A)[sp].[moe]([m5C])[sp].[moe](T)[sp].[moe](G)[sp].[moe]( |
| | A)[sp].[moe](T)[sp].[moe](T)[sp].[moe]([m5C])[sp].[moe](T)[sp].[moe]( |
| | G)[sp].[moe](A)[sp].[moe](A)[sp].[moe](T)[sp].[moe](T)[sp].[moe]([m5C |
| | ])[sp].[moe](T)[sp].[moe](T)[sp].[moe](T)[sp].[moe]([m5C])[sp].[moe](A |
| | )[sp].[moe](A)[sp].[moe]([m5C])}$$$$V2.0 |
| 1310 | RNA1{[lna](T)[sp].[lna](G)[sp].[moe](T)[sp].[fl2r](T)[sp].[fl2r]([m5C])[s |
| | p].[fl2r](T)[sp].[fl2r](T)[sp].[moe](G)[sp].[fl2r](T)[sp].[fl2r](A)[sp].[moe] |
| | ([m5C])[sp].[fl2r](T)[sp].[fl2r](T)[sp].[fl2r]([m5C])[sp].[fl2r](A)[sp].[moe |
| | ](T)[sp].[lna]([m5C])[sp].[lna]([m5C])}$$$$V2.0 |
| 1311 | RNA1{[moe](T)[sp].[moe](G)[sp].[moe](T)[sp].[fl2r](T)[sp].[fl2r]([m5C] |
| | )[sp].[fl2r](T)[sp].[fl2r](T)[sp].[fl2r](G)[sp].[moe](T)[sp].[moe](A)[sp].[fl |
| | 2r]([m5C])[sp].[fl2r](T)[sp].[fl2r](T)[sp].[fl2r]([m5C])[sp].[fl2r](A)[sp].[ |
| | moe](T)[sp].[moe]([m5C])[sp].[moe]([m5C])}$$$$V2.0 |
| 1312 | RNA1{[lna](T)[sp].[moe](G)[sp].[moe](T)[sp].[fl2r](T)[sp].[fl2r]([m5C])[ |
| | sp].[fl2r](T)[sp].[fl2r](T)[sp].[fl2r](G)[sp].[moe](T)[sp].[moe](A)[sp].[fl2r |
| | ]([m5C])[sp].[fl2r](T)[sp].[fl2r](T)[sp].[fl2r]([m5C])[sp].[fl2r](A)[sp].[mo |
| | e](T)[sp].[moe]([m5C])[sp].[lna]([m5C])}$$$$V2.0 |
| 1313 | RNA1{[lna](T)[sp].[lna](G)[sp].[moe](T)[sp].[fl2r](T)[sp].[fl2r]([m5C])[s |
| | p].[fl2r](T)[sp].[fl2r](T)[sp].[fl2r](G)[sp].[moe](T)[sp].[moe](A)[sp].[fl2r] |
| | ([m5C])[sp].[fl2r](T)[sp].[fl2r](T)[sp].[fl2r]([m5C])[sp].[fl2r](A)[sp].[moe |
| | ](T)[sp].[lna]([m5C])[sp].[lna]([m5C])}$$$$V2.0 |
| 1314 | RNA1{[lna](T)[sp].[moe](G)[sp].[fl2r](T)[sp].[fl2r](T)[sp].[fl2r]([m5C])[ |
| | sp].[fl2r](T)[sp].[fl2r](T)[sp].[fl2r](G)[sp].[moe](T)[sp].[moe](A)[sp].[fl2r |
| | ]([m5C])[sp].[fl2r](T)[sp].[fl2r](T)[sp].[fl2r]([m5C])[sp].[fl2r](A)[sp].[fl2r |
| | ](T)[sp].[moe]([m5C])[sp].[lna]([m5C])}$$$$V2.0 |
| 1315 | RNA1{[lna](T)[sp].[lna](G)[sp].[fl2r](T)[sp].[fl2r](T)[sp].[fl2r]([m5C])[s |
| | p].[fl2r](T)[sp].[fl2r](T)[sp].[fl2r](G)[sp].[moe](T)[sp].[moe](A)[sp].[fl2r] |
| | ([m5C])[sp].[fl2r](T)[sp].[fl2r](T)[sp].[fl2r]([m5C])[sp].[fl2r](A)[sp].[fl2r] |
| | (T)[sp].[lna]([m5C])[sp].[lna]([m5C])}$$$$V2.0 |
| 1316 | RNA1{[lna](T)[sp].[lna](G)[sp].[moe](T)[sp].[fl2r](T)[sp].[fl2r]([m5C])[s |
| | p].[fl2r](T)[sp].[fl2r](T)[sp].[moe](G)[sp].[moe](T)[sp].[moe](A)[sp].[mo |
| | e]([m5C])[sp].[fl2r](T)[sp].[fl2r](T)[sp].[fl2r]([m5C])[sp].[fl2r](A)[sp].[m |
| | oe](T)[sp].[lna]([m5C])[sp].[lna]([m5C])}$$$$V2.0 |
| 1317 | RNA1{[lna](T)[sp].[moe](G)[sp].[moe](T)[sp].[fl2r](T)[sp].[fl2r]([m5C])[ |
| | sp].[fl2r](T)[sp].[fl2r](T)[sp].[fl2r](G)[sp].[moe](T)[sp].[fl2r](A)[sp].[moe |
| | ]([m5C])[sp].[fl2r](T)[sp].[fl2r](T)[sp].[fl2r]([m5C])[sp].[fl2r](A)[sp].[mo |
| | e](T)[sp].[moe]([m5C])[sp].[lna]([m5C])}$$$$V2.0 |
| 1318 | RNA1{[lna](T)[sp].[moe](G)[sp].[moe](T)[sp].[fl2r](T)[sp].[fl2r]([m5C])[ |
| | sp].[fl2r](T)[sp].[fl2r](T)[sp].[moe](G)[sp].[fl2r](T)[sp].[moe](A)[sp].[fl2r |
| | ]([m5C])[sp].[fl2r](T)[sp].[fl2r](T)[sp].[fl2r]([m5C])[sp].[fl2r](A)[sp].[mo |
| | e](T)[sp].[moe]([m5C])[sp].[lna]([m5C])}$$$$V2.0 |
| 1319 | RNA1{[lna](T)[sp].[moe](G)[sp].[moe](T)[sp].[fl2r](T)[sp].[fl2r]([m5C])[ |
| | sp].[fl2r](T)[sp].[fl2r](T)[sp].[fl2r](G)[sp].[moe](T)[sp].[moe](A)[sp].[mo |
| | e]([m5C])[sp].[moe](T)[sp].[moe](T)[sp].[moe]([m5C])[sp].[moe](A)[sp]. |
| | [moe](T)[sp].[moe]([m5C])[sp].[lna]([m5C])}$$$$V2.0 |
| 1320 | RNA1{[lna](T)[sp].[moe](G)[sp].[moe](T)[sp].[moe](T)[sp].[moe]([m5C] |
| | )[sp].[fl2r](T)[sp].[fl2r](T)[sp].[fl2r](G)[sp].[fl2r](T)[sp].[fl2r](A)[sp].[mo |
| | e]([m5C])[sp].[moe](T)[sp].[moe](T)[sp].[moe]([m5C])[sp].[moe](A)[sp]. |
| | [moe](T)[sp].[moe]([m5C])[sp].[lna]([m5C])}$$$$V2.0 |
| 1321 | RNA1{[lna](T)[sp].[moe](G)[sp].[moe](T)[sp].[moe](T)[sp].[moe]([m5C] |
| | )[sp].[moe](T)[sp].[fl2r](T)[sp].[fl2r](G)[sp].[fl2r](T)[sp].[fl2r](A)[sp].[fl2 |
| | r]([m5C])[sp].[moe](T)[sp].[moe](T)[sp].[moe]([m5C])[sp].[moe](A)[sp].[ |
| | moe](T)[sp].[moe]([m5C])[sp].[lna]([m5C])}$$$$V2.0 |
| 1322 | RNA1{[lna](T)[sp].[moe](G)[sp].[moe](T)[sp].[moe](T)[sp].[moe]([m5C] |
| | )[sp].[moe](T)[sp].[moe](T)[sp].[moe](G)[sp].[fl2r](T)[sp].[fl2r](A)[sp].[fl |
| | 2r]([m5C])[sp].[fl2r](T)[sp].[fl2r](T)[sp].[moe]([m5C])[sp].[moe](A)[sp].[ |
| | moe](T)[sp].[moe]([m5C])[sp].[lna]([m5C])}$$$$V2.0 |
| 1323 | RNA1{[lna](T)[sp].[moe](G)[sp].[moe](T)[sp].[moe](T)[sp].[moe]([m5C] |
| | )[sp].[moe](T)[sp].[moe](T)[sp].[moe](G)[sp].[moe](T)[sp].[moe](A)[sp].[ |
| | fl2r]([m5C])[sp].[fl2r](T)[sp].[fl2r](T)[sp].[fl2r]([m5C])[sp].[fl2r](A)[sp].[ |
| | moe](T)[sp].[moe]([m5C])[sp].[lna]([m5C])}$$$$V2.0 |
| 1324 | RNA1{[lna](T)[sp].[moe](G)[sp].[moe](T)[sp].[fl2r](T)[sp].[fl2r]([m5C])[ |
| | sp].[fl2r](T)[sp].[fl2r](T)[sp].[fl2r](G)[sp].[fl2r](T)[sp].[moe](A)[sp].[moe |
| | ]([m5C])[sp].[moe](T)[sp].[moe](T)[sp].[moe]([m5C])[sp].[moe](A)[sp].[ |
| | moe](T)[sp].[moe]([m5C])[sp].[lna]([m5C])}$$$$V2.0 |
| 1325 | RNA1{[lna](T)[sp].[moe](G)[sp].[moe](T)[sp].[moe](T)[sp].[fl2r]([m5C]) |
| | [sp].[fl2r](T)[sp].[fl2r](T)[sp].[fl2r](G)[sp].[fl2r](T)[sp].[fl2r](A)[sp].[moe |
| | ]([m5C])[sp].[moe](T)[sp].[moe](T)[sp].[moe]([m5C])[sp].[moe](A)[sp].[ |
| | moe](T)[sp].[moe]([m5C])[sp].[lna]([m5C])}$$$$V2.0 |
| 1326 | RNA1{[lna](T)[sp].[moe](G)[sp].[moe](T)[sp].[moe](T)[sp].[moe]([m5C] |
| | )[sp].[fl2r](T)[sp].[fl2r](T)[sp].[fl2r](G)[sp].[fl2r](T)[sp].[fl2r](A)[sp].[fl2r |
| | ]([m5C])[sp].[moe](T)[sp].[moe](T)[sp].[moe]([m5C])[sp].[moe](A)[sp].[ |
| | moe](T)[sp].[moe]([m5C])[sp].[lna]([m5C])}$$$$V2.0 |
| 1327 | RNA1{[lna](T)[sp].[moe](G)[sp].[moe](T)[sp].[moe](T)[sp].[moe]([m5C] |
| | )[sp].[moe](T)[sp].[fl2r](T)[sp].[fl2r](G)[sp].[fl2r](T)[sp].[fl2r](A)[sp].[fl2 |
| | r]([m5C])[sp].[fl2r](T)[sp].[moe](T)[sp].[moe]([m5C])[sp].[moe](A)[sp].[ |
| | moe](T)[sp].[moe]([m5C])[sp].[lna]([m5C])}$$$$V2.0 |
| 1328 | RNA1{[lna](T)[sp].[moe](G)[sp].[moe](T)[sp].[moe](T)[sp].[moe]([m5C] |
| | )[sp].[moe](T)[sp].[moe](T)[sp].[fl2r](G)[sp].[fl2r](T)[sp].[fl2r](A)[sp].[fl |
| | 2r]([m5C])[sp].[fl2r](T)[sp].[fl2r](T)[sp].[moe]([m5C])[sp].[moe](A)[sp].[ |
| | moe](T)[sp].[moe]([m5C])[sp].[lna]([m5C])}$$$$V2.0 |
| 1329 | RNA1{[lna](T)[sp].[moe](G)[sp].[moe](T)[sp].[moe](T)[sp].[moe]([m5C] |
| | )[sp].[moe](T)[sp].[moe](T)[sp].[moe](G)[sp].[fl2r](T)[sp].[fl2r](A)[sp].[fl |
| | 2r]([m5C])[sp].[fl2r](T)[sp].[fl2r](T)[sp].[fl2r]([m5C])[sp].[moe](A)[sp].[ |
| | moe](T)[sp].[moe]([m5C])[sp].[lna]([m5C])}$$$$V2.0 |
| 1330 | RNA1{[lna](T)[sp].[moe](G)[sp].[moe](T)[sp].[moe](T)[sp].[moe]([m5C] |
| | )[sp].[moe](T)[sp].[moe](T)[sp].[moe](G)[sp].[moe](T)[sp].[fl2r](A)[sp].[f |
| | l2r]([m5C])[sp].[fl2r](T)[sp].[fl2r](T)[sp].[fl2r]([m5C])[sp].[fl2r](A)[sp].[ |
| | moe](T)[sp].[moe]([m5C])[sp].[lna]([m5C])}$$$$V2.0 |
| 1331 | RNA1{[lna](T)[sp].[moe](G)[sp].[moe](T)[sp].[fl2r](T)[sp].[fl2r]([m5C])[ |
| | sp].[fl2r](T)[sp].[fl2r](T)[sp].[fl2r](G)[sp].[fl2r](T)[sp].[fl2r](A)[sp].[moe] |
| | ([m5C])[sp].[moe](T)[sp].[moe](T)[sp].[moe]([m5C])[sp].[moe](A)[sp].[ |
| | moe](T)[sp].[moe]([m5C])[sp].[lna]([m5C])}$$$$V2.0 |
| 1332 | RNA1{[lna](T)[sp].[moe](G)[sp].[moe](T)[sp].[moe](T)[sp].[fl2r]([m5C]) |
| | [sp].[fl2r](T)[sp].[fl2r](T)[sp].[fl2r](G)[sp].[fl2r](T)[sp].[fl2r](A)[sp].[fl2r] |
| | ([m5C])[sp].[moe](T)[sp].[moe](T)[sp].[moe]([m5C])[sp].[moe](A)[sp].[ |
| | moe](T)[sp].[moe]([m5C])[sp].[lna]([m5C])}$$$$V2.0 |
| 1333 | RNA1{[lna](T)[sp].[moe](G)[sp].[moe](T)[sp].[moe](T)[sp].[moe]([m5C] |
| | )[sp].[fl2r](T)[sp].[fl2r](T)[sp].[fl2r](G)[sp].[fl2r](T)[sp].[fl2r](A)[sp].[fl2r |
| | ]([m5C])[sp].[fl2r](T)[sp].[moe](T)[sp].[moe]([m5C])[sp].[moe](A)[sp].[ |
| | moe](T)[sp].[moe]([m5C])[sp].[lna]([m5C])}$$$$V2.0 |
| 1334 | RNA1{[lna](T)[sp].[moe](G)[sp].[moe](T)[sp].[moe](T)[sp].[moe]([m5C] |
| | )[sp].[moe](T)[sp].[fl2r](T)[sp].[fl2r](G)[sp].[fl2r](T)[sp].[fl2r](A)[sp].[fl2 |
| | r]([m5C])[sp].[fl2r](T)[sp].[fl2r](T)[sp].[moe]([m5C])[sp].[moe](A)[sp].[ |
| | moe](T)[sp].[moe]([m5C])[sp].[lna]([m5C])}$$$$V2.0 |
| 1335 | RNA1{[lna](T)[sp].[moe](G)[sp].[moe](T)[sp].[moe](T)[sp].[moe]([m5C] |
| | )[sp].[moe](T)[sp].[moe](T)[sp].[fl2r](G)[sp].[fl2r](T)[sp].[fl2r](A)[sp].[fl |
| | 2r]([m5C])[sp].[fl2r](T)[sp].[fl2r](T)[sp].[fl2r]([m5C])[sp].[moe](A)[sp].[ |
| | moe](T)[sp].[moe]([m5C])[sp].[lna]([m5C])}$$$$V2.0 |
| 1336 | RNA1{[lna](T)[sp].[moe](G)[sp].[moe](T)[sp].[moe](T)[sp].[moe]([m5C] |
| | )[sp].[moe](T)[sp].[moe](T)[sp].[moe](G)[sp].[fl2r](T)[sp].[fl2r](A)[sp].[fl |
| | 2r]([m5C])[sp].[fl2r](T)[sp].[fl2r](T)[sp].[fl2r]([m5C])[sp].[fl2r](A)[sp].[ |
| | moe](T)[sp].[moe]([m5C])[sp].[lna]([m5C])}$$$$V2.0 |
| 1337 | RNA1{[lna](T)[sp].[moe](G)[sp].[moe](T)[sp].[fl2r](T)[sp].[fl2r]([m5C])[ |
| | sp].[fl2r](T)[sp].[fl2r](T)[sp].[fl2r](G)[sp].[fl2r](T)[sp].[fl2r](A)[sp].[fl2r]( |
| | [m5C])[sp].[moe](T)[sp].[moe](T)[sp].[moe]([m5C])[sp].[moe](A)[sp].[m |
| | oe](T)[sp].[moe]([m5C])[sp].[lna]([m5C])}$$$$V2.0 |
| 1338 | RNA1{[lna](T)[sp].[moe](G)[sp].[moe](T)[sp].[moe](T)[sp].[fl2r]([m5C]) |
| | [sp].[fl2r](T)[sp].[fl2r](T)[sp].[fl2r](G)[sp].[fl2r](T)[sp].[fl2r](A)[sp].[fl2r] |
| | ([m5C])[sp].[fl2r](T)[sp].[moe](T)[sp].[moe]([m5C])[sp].[moe](A)[sp].[m |
| | oe](T)[sp].[moe]([m5C])[sp].[lna]([m5C])}$$$$V2.0 |
| 1339 | RNA1{[lna](T)[sp].[moe](G)[sp].[moe](T)[sp].[moe](T)[sp].[moe]([m5C] |
| | )[sp].[fl2r](T)[sp].[fl2r](T)[sp].[fl2r](G)[sp].[fl2r](T)[sp].[fl2r](A)[sp].[fl2r |
| | ]([m5C])[sp].[fl2r](T)[sp].[fl2r](T)[sp].[moe]([m5C])[sp].[moe](A)[sp].[m |
| | oe](T)[sp].[moe]([m5C])[sp].[lna]([m5C])}$$$$V2.0 |
| 1340 | RNA1{[lna](T)[sp].[moe](G)[sp].[moe](T)[sp].[moe](T)[sp].[moe]([m5C] |
| | )[sp].[moe](T)[sp].[fl2r](T)[sp].[fl2r](G)[sp].[fl2r](T)[sp].[fl2r](A)[sp].[fl2 |
| | r]([m5C])[sp].[fl2r](T)[sp].[fl2r](T)[sp].[fl2r]([m5C])[sp].[moe](A)[sp].[m |
| | oe](T)[sp].[moe]([m5C])[sp].[lna]([m5C])}$$$$V2.0 |
| 1341 | RNA1{[lna](T)[sp].[moe](G)[sp].[moe](T)[sp].[moe](T)[sp].[moe]([m5C] |
| | )[sp].[moe](T)[sp].[moe](T)[sp].[fl2r](G)[sp].[fl2r](T)[sp].[fl2r](A)[sp].[fl |
| | 2r]([m5C])[sp].[fl2r](T)[sp].[fl2r](T)[sp].[fl2r]([m5C])[sp].[fl2r](A)[sp].[ |
| | moe](T)[sp].[moe]([m5C])[sp].[lna]([m5C])}$$$$V2.0 |
| 1342 | RNA1{[lna](T)[sp].[moe](G)[sp].[moe](T)[sp].[fl2r](T)[sp].[fl2r]([m5C])[ |
| | sp].[fl2r](T)[sp].[fl2r](T)[sp].[fl2r](G)[sp].[fl2r](T)[sp].[fl2r](A)[sp].[fl2r]( |
| | [m5C])[sp].[fl2r](T)[sp].[moe](T)[sp].[moe]([m5C])[sp].[moe](A)[sp].[mo |
| | e](T)[sp].[moe]([m5C])[sp].[lna]([m5C])}$$$$V2.0 |
| 1343 | RNA1{[lna](T)[sp].[moe](G)[sp].[moe](T)[sp].[moe](T)[sp].[fl2r]([m5C]) |
| | [sp].[fl2r](T)[sp].[fl2r](T)[sp].[fl2r](G)[sp].[fl2r](T)[sp].[fl2r](A)[sp].[fl2r] |
| | ([m5C])[sp].[fl2r](T)[sp].[fl2r](T)[sp].[moe]([m5C])[sp].[moe](A)[sp].[m |
| | oe](T)[sp].[moe]([m5C])[sp].[lna]([m5C])}$$$$V2.0 |
| 1344 | RNA1{[lna](T)[sp].[moe](G)[sp].[moe](T)[sp].[moe](T)[sp].[moe]([m5C] |
| | )[sp].[fl2r](T)[sp].[fl2r](T)[sp].[fl2r](G)[sp].[fl2r](T)[sp].[fl2r](A)[sp].[fl2r |
| | ]([m5C])[sp].[fl2r](T)[sp].[fl2r](T)[sp].[fl2r]([m5C])[sp].[moe](A)[sp].[m |
| | oe](T)[sp].[moe]([m5C])[sp].[lna]([m5C])}$$$$V2.0 |
| 1345 | RNA1{[lna](T)[sp].[moe](G)[sp].[moe](T)[sp].[moe](T)[sp].[moe]([m5C] |
| | )[sp].[moe](T)[sp].[fl2r](T)[sp].[fl2r](G)[sp].[fl2r](T)[sp].[fl2r](A)[sp].[fl2 |
| | r]([m5C])[sp].[fl2r](T)[sp].[fl2r](T)[sp].[fl2r]([m5C])[sp].[fl2r](A)[sp].[m |
| | oe](T)[sp].[moe]([m5C])[sp].[lna]([m5C])}$$$$V2.0 |
| 1346 | RNA1{[moe](T)[sp].[fl2r](G)[sp].[fl2r](T)[sp].[fl2r](T)[sp].[fl2r]([m5C])[ |
| | sp].[fl2r](T)[sp].[fl2r](T)[sp].[fl2r](G)[sp].[fl2r](T)[sp].[fl2r](A)[sp].[fl2r]( |
| | [m5C])[sp].[fl2r](T)[sp].[fl2r](T)[sp].[fl2r]([m5C])[sp].[fl2r](A)[sp].[fl2r]( |
| | T)[sp].[fl2r]([m5C])[sp].[moe]([m5C])}$$$$V2.0 |
| 1347 | RNA1{[lna](T)[sp].[fl2r](G)[sp].[moe](T)[sp].[fl2r](T)[sp].[fl2r]([m5C])[ |
| | sp].[fl2r](T)[sp].[fl2r](T)[sp].[fl2r](G)[sp].[fl2r](T)[sp].[fl2r](A)[sp].[fl2r]( |
| | [m5C])[sp].[fl2r](T)[sp].[fl2r](T)[sp].[fl2r]([m5C])[sp].[fl2r](A)[sp].[fl2r]( |
| | T)[sp].[fl2r]([m5C])[sp].[lna]([m5C])}$$$$V2.0 |
| 1348 | RNA1{[lna](T)[sp].[fl2r](G)[sp].[fl2r](T)[sp].[moe](T)[sp].[fl2r]([m5C])[ |
| | sp].[fl2r](T)[sp].[fl2r](T)[sp].[fl2r](G)[sp].[fl2r](T)[sp].[fl2r](A)[sp].[fl2r]( |
| | [m5C])[sp].[fl2r](T)[sp].[fl2r](T)[sp].[fl2r]([m5C])[sp].[fl2r](A)[sp].[fl2r]( |
| | T)[sp].[fl2r]([m5C])[sp].[lna]([m5C])}$$$$V2.0 |
| 1349 | RNA1{[lna](T)[sp].[fl2r](G)[sp].[fl2r](T)[sp].[fl2r](T)[sp].[moe]([m5C])[ |
| | sp].[fl2r](T)[sp].[fl2r](T)[sp].[fl2r](G)[sp].[fl2r](T)[sp].[fl2r](A)[sp].[fl2r]( |
| | [m5C])[sp].[fl2r](T)[sp].[fl2r](T)[sp].[fl2r]([m5C])[sp].[fl2r](A)[sp].[fl2r]( |
| | T)[sp].[fl2r]([m5C])[sp].[lna]([m5C])}$$$$V2.0 |
| 1350 | RNA1{[lna](T)[sp].[fl2r](G)[sp].[fl2r](T)[sp].[fl2r](T)[sp].[fl2r]([m5C])[s |
| | p].[moe](T)[sp].[fl2r](T)[sp].[fl2r](G)[sp].[fl2r](T)[sp].[fl2r](A)[sp].[fl2r]( |
| | [m5C])[sp].[fl2r](T)[sp].[fl2r](T)[sp].[fl2r]([m5C])[sp].[fl2r](A)[sp].[fl2r]( |
| | T)[sp].[fl2r]([m5C])[sp].[lna]([m5C])}$$$$V2.0 |
| 1351 | RNA1{[lna](T)[sp].[fl2r](G)[sp].[fl2r](T)[sp].[fl2r](T)[sp].[fl2r]([m5C])[s |
| | p].[fl2r](T)[sp].[moe](T)[sp].[fl2r](G)[sp].[fl2r](T)[sp].[fl2r](A)[sp].[fl2r]( |
| | [m5C])[sp].[fl2r](T)[sp].[fl2r](T)[sp].[fl2r]([m5C])[sp].[fl2r](A)[sp].[fl2r]( |
| | T)[sp].[fl2r]([m5C])[sp].[lna]([m5C])}$$$$V2.0 |
| 1352 | RNA1{[lna](T)[sp].[fl2r](G)[sp].[fl2r](T)[sp].[fl2r](T)[sp].[fl2r]([m5C])[s |
| | p].[fl2r](T)[sp].[fl2r](T)[sp].[moe](G)[sp].[fl2r](T)[sp].[fl2r](A)[sp].[fl2r]( |
| | [m5C])[sp].[fl2r](T)[sp].[fl2r](T)[sp].[fl2r]([m5C])[sp].[fl2r](A)[sp].[fl2r]( |
| | T)[sp].[fl2r]([m5C])[sp].[lna]([m5C])}$$$$V2.0 |
| 1353 | RNA1{[lna](T)[sp].[fl2r](G)[sp].[fl2r](T)[sp].[fl2r](T)[sp].[fl2r]([m5C])[s |
| | p].[fl2r](T)[sp].[fl2r](T)[sp].[fl2r](G)[sp].[moe](T)[sp].[fl2r](A)[sp].[fl2r]( |
| | [m5C])[sp].[fl2r](T)[sp].[fl2r](T)[sp].[fl2r]([m5C])[sp].[fl2r](A)[sp].[fl2r]( |
| | T)[sp].[fl2r]([m5C])[sp].[lna]([m5C])}$$$$V2.0 |
| 1354 | RNA1{[lna](T)[sp].[fl2r](G)[sp].[fl2r](T)[sp].[fl2r](T)[sp].[fl2r]([m5C])[s |
| | p].[fl2r](T)[sp].[fl2r](T)[sp].[fl2r](G)[sp].[fl2r](T)[sp].[moe](A)[sp].[fl2r]( |
| | [m5C])[sp].[fl2r](T)[sp].[fl2r](T)[sp].[fl2r]([m5C])[sp].[fl2r](A)[sp].[fl2r]( |
| | T)[sp].[fl2r]([m5C])[sp].[lna]([m5C])}$$$$V2.0 |
| 1355 | RNA1{[lna](T)[sp].[fl2r](G)[sp].[fl2r](T)[sp].[fl2r](T)[sp].[fl2r]([m5C])[s |
| | p].[fl2r](T)[sp].[fl2r](T)[sp].[fl2r](G)[sp].[fl2r](T)[sp].[fl2r](A)[sp].[moe]( |
| | [m5C])[sp].[fl2r](T)[sp].[fl2r](T)[sp].[fl2r]([m5C])[sp].[fl2r](A)[sp].[fl2r]( |
| | T)[sp].[fl2r]([m5C])[sp].[lna]([m5C])}$$$$V2.0 |
| 1356 | RNA1{[lna](T)[sp].[fl2r](G)[sp].[fl2r](T)[sp].[fl2r](T)[sp].[fl2r]([m5C])[s |
| | p].[fl2r](T)[sp].[fl2r](T)[sp].[fl2r](G)[sp].[fl2r](T)[sp].[fl2r](A)[sp].[fl2r]([ |
| | m5C])[sp].[moe](T)[sp].[fl2r](T)[sp].[fl2r]([m5C])[sp].[fl2r](A)[sp].[fl2r]( |
| | T)[sp].[fl2r]([m5C])[sp].[lna]([m5C])}$$$$V2.0 |
| 1357 | RNA1{[lna](T)[sp].[fl2r](G)[sp].[fl2r](T)[sp].[fl2r](T)[sp].[fl2r]([m5C])[s |
| | p].[fl2r](T)[sp].[fl2r](T)[sp].[fl2r](G)[sp].[fl2r](T)[sp].[fl2r](A)[sp].[fl2r]([ |
| | m5C])[sp].[fl2r](T)[sp].[moe](T)[sp].[fl2r]([m5C])[sp].[fl2r](A)[sp].[fl2r]( |
| | T)[sp].[fl2r]([m5C])[sp].[lna]([m5C])}$$$$V2.0 |
| 1358 | RNA1{[lna](T)[sp].[fl2r](G)[sp].[fl2r](T)[sp].[fl2r](T)[sp].[fl2r]([m5C])[s |
| | p].[fl2r](T)[sp].[fl2r](T)[sp].[fl2r](G)[sp].[fl2r](T)[sp].[fl2r](A)[sp].[fl2r]([ |
| | m5C])[sp].[fl2r](T)[sp].[fl2r](T)[sp].[moe]([m5C])[sp].[fl2r](A)[sp].[fl2r]( |
| | T)[sp].[fl2r]([m5C])[sp].[lna]([m5C])}$$$$V2.0 |
| 1359 | RNA1{[lna](T)[sp].[fl2r](G)[sp].[fl2r](T)[sp].[fl2r](T)[sp].[fl2r]([m5C])[s |
| | p].[fl2r](T)[sp].[fl2r](T)[sp].[fl2r](G)[sp].[fl2r](T)[sp].[fl2r](A)[sp].[fl2r]([ |
| | m5C])[sp].[fl2r](T)[sp].[fl2r](T)[sp].[fl2r]([m5C])[sp].[moe](A)[sp].[fl2r]( |
| | T)[sp].[fl2r]([m5C])[sp].[lna]([m5C])}$$$$V2.0 |
| 1360 | RNA1{[lna](T)[sp].[fl2r](G)[sp].[fl2r](T)[sp].[fl2r](T)[sp].[fl2r]([m5C])[s |
| | p].[fl2r](T)[sp].[fl2r](T)[sp].[fl2r](G)[sp].[fl2r](T)[sp].[fl2r](A)[sp].[fl2r]([ |
| | m5C])[sp].[fl2r](T)[sp].[fl2r](T)[sp].[fl2r]([m5C])[sp].[fl2r](A)[sp].[moe]( |
| | T)[sp].[fl2r]([m5C])[sp].[lna]([m5C])}$$$$V2.0 |
| 1361 | RNA1{[lna](T)[sp].[fl2r](G)[sp].[fl2r](T)[sp].[fl2r](T)[sp].[fl2r]([m5C])[s |
| | p].[fl2r](T)[sp].[fl2r](T)[sp].[fl2r](G)[sp].[fl2r](T)[sp].[fl2r](A)[sp].[fl2r]([ |
| | m5C])[sp].[fl2r](T)[sp].[fl2r](T)[sp].[fl2r]([m5C])[sp].[fl2r](A)[sp].[fl2r]( |
| | T)[sp].[moe]([m5C])[sp].[lna]([m5C])}$$$$V2.0 |
| 1362 | RNA1{[lna](T)[sp].[moe](G)[sp].[moe](T)[sp].[fl2r](T)[sp].[fl2r]([m5C])[ |
| | sp].[fl2r](T)[sp].[fl2r](T)[sp].[fl2r](G)[sp].[fl2r](T)[sp].[moe](A)[sp].[moe |
| | ]([m5C])[sp].[fl2r](T)[sp].[fl2r](T)[sp].[fl2r]([m5C])[sp].[fl2r](A)[sp].[mo |
| | e](T)[sp].[moe]([m5C])[sp].[lna]([m5C])}$$$$V2.0 |
| 1363 | RNA1{[lna](T)[sp].[moe](G)[sp].[moe](T)[sp].[fl2r](T)[sp].[fl2r]([m5C])[ |
| | sp].[fl2r](T)[sp].[fl2r](T)[sp].[moe](G)[sp].[moe](T)[sp].[fl2r](A)[sp].[fl2r |
| | ]([m5C])[sp].[fl2r](T)[sp].[fl2r](T)[sp].[fl2r]([m5C])[sp].[fl2r](A)[sp].[mo |
| | e](T)[sp].[moe]([m5C])[sp].[lna]([m5C])}$$$$V2.0 |
| 1364 | RNA1{[lna](G)[sp].[fl2r](T)[sp].[fl2r](G)[sp].[fl2r](T)[sp].[fl2r](T)[sp].[fl |
| | 2r]([m5C])[sp].[fl2r](T)[sp].[fl2r](T)[sp].[fl2r](G)[sp].[fl2r](T)[sp].[fl2r]( |
| | A)[sp].[fl2r]([m5C])[sp].[fl2r](T)[sp].[fl2r](T)[sp].[lna]([m5C])}$$$$V2.0 |
| 1365 | RNA1{[lna](G)[sp].[moe](T)[sp].[fl2r](G)[sp].[fl2r](T)[sp].[fl2r](T)[sp].[f |
| | l2r]([m5C])[sp].[fl2r](T)[sp].[fl2r](T)[sp].[fl2r](G)[sp].[fl2r](T)[sp].[fl2r]( |
| | A)[sp].[fl2r]([m5C])[sp].[fl2r](T)[sp].[moe](T)[sp].[lna]([m5C])}$$$$V2. |
| | 0 |
| 1366 | RNA1{[lna](G)[sp].[moe](T)[sp].[moe](G)[sp].[fl2r](T)[sp].[fl2r](T)[sp].[ |
| | fl2r]([m5C])[sp].[fl2r](T)[sp].[fl2r](T)[sp].[fl2r](G)[sp].[fl2r](T)[sp].[fl2r] |
| | (A)[sp].[fl2r]([m5C])[sp].[moe](T)[sp].[moe](T)[sp].[lna]([m5C])}$$$$V |
| | 2.0 |
| 1367 | RNA1{[lna](G)[sp].[moe](T)[sp].[moe](G)[sp].[moe](T)[sp].[fl2r](T)[sp]. |
| | [fl2r]([m5C])[sp].[fl2r](T)[sp].[fl2r](T)[sp].[fl2r](G)[sp].[fl2r](T)[sp].[fl2r |
| | ](A)[sp].[moe]([m5C])[sp].[moe](T)[sp].[moe](T)[sp].[lna]([m5C])}$$$$ |
| | V2.0 |
| 1368 | RNA1{[lna](G)[sp].[moe](T)[sp].[moe](G)[sp].[moe](T)[sp].[moe](T)[sp] |
| | .[fl2r]([m5C])[sp].[fl2r](T)[sp].[fl2r](T)[sp].[fl2r](G)[sp].[fl2r](T)[sp].[mo |
| | e](A)[sp].[moe]([m5C])[sp].[moe](T)[sp].[moe](T)[sp].[lna]([m5C])}$$$$ |
| | V2.0 |
| 1369 | RNA1{[lna](G)[sp].[fl2r](T)[sp].[fl2r](G)[sp].[fl2r](T)[sp].[fl2r](T)[sp].[fl |
| | 2r]([m5C])[sp].[moe](T)[sp].[moe](T)[sp].[moe](G)[sp].[fl2r](T)[sp].[fl2r] |
| | (A)[sp].[fl2r]([m5C])[sp].[fl2r](T)[sp].[fl2r](T)[sp].[lna]([m5C])}$$$$V2. |
| | 0 |
| 1370 | RNA1{[lna](G)[sp].[moe](T)[sp].[fl2r](G)[sp].[fl2r](T)[sp].[fl2r](T)[sp].[f |
| | l2r]([m5C])[sp].[fl2r](T)[sp].[moe](T)[sp].[fl2r](G)[sp].[fl2r](T)[sp].[fl2r] |
| | (A)[sp].[fl2r]([m5C])[sp].[fl2r](T)[sp].[moe](T)[sp].[lna]([m5C])}$$$$V2 |
| | .0 |
| 1371 | RNA1{[lna](G)[sp].[moe](T)[sp].[fl2r](G)[sp].[fl2r](T)[sp].[fl2r](T)[sp].[f |
| | l2r]([m5C])[sp].[moe](T)[sp].[moe](T)[sp].[moe](G)[sp].[fl2r](T)[sp].[fl2r |
| | ](A)[sp].[fl2r]([m5C])[sp].[fl2r](T)[sp].[moe](T)[sp].[lna]([m5C])}$$$$V |
| | 2.0 |
| 1372 | RNA1{[lna](G)[sp].[moe](T)[sp].[moe](G)[sp].[fl2r](T)[sp].[fl2r](T)[sp].[ |
| | fl2r]([m5C])[sp].[fl2r](T)[sp].[moe](T)[sp].[fl2r](G)[sp].[fl2r](T)[sp].[fl2r |
| | ](A)[sp].[fl2r]([m5C])[sp].[moe](T)[sp].[moe](T)[sp].[lna]([m5C])}$$$$V |
| | 2.0 |
| 1373 | RNA1{[lna](G)[sp].[fl2r](T)[sp].[fl2r](G)[sp].[fl2r](T)[sp].[fl2r](T)[sp].[ |
| | moe]([m5C])[sp].[moe](T)[sp].[moe](T)[sp].[moe](G)[sp].[moe](T)[sp].[fl |
| | 2r](A)[sp].[fl2r]([m5C])[sp].[fl2r](T)[sp].[fl2r](T)[sp].[lna]([m5C])}$$$$ |
| | V2.0 |
| 1374 | RNA1{[lna]([m5C])[sp].[fl2r](T)[sp].[fl2r](T)[sp].[fl2r](G)[sp].[fl2r](T)[s |
| | p].[fl2r](A)[sp].[fl2r]([m5C])[sp].[fl2r](T)[sp].[fl2r](T)[sp].[fl2r]([m5C])[s |
| | p].[fl2r](A)[sp].[fl2r](T)[sp].[fl2r]([m5C])[sp].[fl2r]([m5C])[sp].[lna]([m5 |
| | C])}$$$$V2.0 |
| 1375 | RNA1{[lna]([m5C])[sp].[moe](T)[sp].[fl2r](T)[sp].[fl2r](G)[sp].[fl2r](T)[ |
| | sp].[fl2r](A)[sp].[fl2r]([m5C])[sp].[fl2r](T)[sp].[fl2r](T)[sp].[fl2r]([m5C])[ |
| | sp].[fl2r](A)[sp].[fl2r](T)[sp].[fl2r]([m5C])[sp].[moe]([m5C])[sp].[lna]([m |
| | 5C])}$$$$V2.0 |
| 1376 | RNA1{[lna]([m5C])[sp].[moe](T)[sp].[moe](T)[sp].[fl2r](G)[sp].[fl2r](T)[ |
| | sp].[fl2r](A)[sp].[fl2r]([m5C])[sp].[fl2r](T)[sp].[fl2r](T)[sp].[fl2r]([m5C])[ |
| | sp].[fl2r](A)[sp].[fl2r](T)[sp].[moe]([m5C])[sp].[moe]([m5C])[sp].[lna]([ |
| | m5C])}$$$$V2.0 |
| 1377 | RNA1{[lna]([m5C])[sp].[moe](T)[sp].[moe](T)[sp].[moe](G)[sp].[fl2r](T) |
| | [sp].[fl2r](A)[sp].[fl2r]([m5C])[sp].[fl2r](T)[sp].[fl2r](T)[sp].[fl2r]([m5C]) |
| | [sp].[fl2r](A)[sp].[moe](T)[sp].[moe]([m5C])[sp].[moe]([m5C])[sp].[lna]([ |
| | m5C])}$$$$V2.0 |
| 1378 | RNA1{[lna]([m5C])[sp].[moe](T)[sp].[moe](T)[sp].[moe](G)[sp].[moe](T |
| | )[sp].[fl2r](A)[sp].[fl2r]([m5C])[sp].[fl2r](T)[sp].[fl2r](T)[sp].[fl2r]([m5C] |
| | )[sp].[moe](A)[sp].[moe](T)[sp].[moe]([m5C])[sp].[moe]([m5C])[sp].[lna] |
| | ([m5C])}$$$$V2.0 |
| 1379 | RNA1{[lna]([m5C])[sp].[fl2r](T)[sp].[fl2r](T)[sp].[fl2r](G)[sp].[fl2r](T)[s |
| | p].[fl2r](A)[sp].[moe]([m5C])[sp].[moe](T)[sp].[moe](T)[sp].[fl2r]([m5C] |
| | )[sp].[fl2r](A)[sp].[fl2r](T)[sp].[fl2r]([m5C])[sp].[fl2r]([m5C])[sp].[lna]([ |
| | m5C])}$$$$V2.0 |
| 1380 | RNA1{[lna]([m5C])[sp].[moe](T)[sp].[fl2r](T)[sp].[fl2r](G)[sp].[fl2r](T)[ |
| | sp].[fl2r](A)[sp].[fl2r]([m5C])[sp].[moe](T)[sp].[fl2r](T)[sp].[fl2r]([m5C]) |
| | [sp].[fl2r](A)[sp].[fl2r](T)[sp].[fl2r]([m5C])[sp].[moe]([m5C])[sp].[lna]([ |
| | m5C])}$$$$V2.0 |
| 1381 | RNA1{[lna]([m5C])[sp].[moe](T)[sp].[fl2r](T)[sp].[fl2r](G)[sp].[fl2r](T)[ |
| | sp].[fl2r](A)[sp].[moe]([m5C])[sp].[moe](T)[sp].[moe](T)[sp].[fl2r]([m5C |
| | ])[sp].[fl2r](A)[sp].[fl2r](T)[sp].[fl2r]([m5C])[sp].[moe]([m5C])[sp].[moe] |
| | ([m5C])}$$$$V2.0 |
| 1382 | RNA1{[lna]([m5C])[sp].[moe](T)[sp].[moe](T)[sp].[fl2r](G)[sp].[fl2r](T)[ |
| | sp].[fl2r](A)[sp].[fl2r]([m5C])[sp].[moe](T)[sp].[fl2r](T)[sp].[fl2r]([m5C]) |
| | [sp].[fl2r](A)[sp].[fl2r](T)[sp].[moe]([m5C])[sp].[moe]([m5C])[sp].[lna]([ |
| | m5C])}$$$$V2.0 |
| 1383 | RNA1{[lna]([m5C])[sp].[fl2r](T)[sp].[fl2r](T)[sp].[fl2r](G)[sp].[fl2r](T)[s |
| | p].[moe](A)[sp].[moe]([m5C])[sp].[moe](T)[sp].[moe](T)[sp].[moe]([m5C |
| | ])[sp].[fl2r](A)[sp].[fl2r](T)[sp].[fl2r]([m5C])[sp].[fl2r]([m5C])[sp].[lna]([ |
| | m5C])}$$$$V2.0 |
| 1384 | RNA1{[lna](T)[sp].[fl2r]([m5C])[sp].[fl2r](T)[sp].[fl2r](T)[sp].[fl2r](G)[s |
| | p].[fl2r](T)[sp].[fl2r](A)[sp].[fl2r]([m5C])[sp].[fl2r](T)[sp].[fl2r](T)[sp].[fl |
| | 2r]([m5C])[sp].[fl2r](A)[sp].[fl2r](T)[sp].[fl2r]([m5C])[sp].[lna]([m5C])}$ |
| | $$$V2.0 |
| 1385 | RNA1{[lna](T)[sp].[moe]([m5C])[sp].[fl2r](T)[sp].[fl2r](T)[sp].[fl2r](G)[ |
| | sp].[fl2r](T)[sp].[fl2r](A)[sp].[fl2r]([m5C])[sp].[fl2r](T)[sp].[fl2r](T)[sp].[ |
| | fl2r]([m5C])[sp].[fl2r](A)[sp].[fl2r](T)[sp].[moe]([m5C])[sp].[lna]([m5C]) |
| | }$$$$V2.0 |
| 1386 | RNA1{[lna](T)[sp].[moe]([m5C])[sp].[moe](T)[sp].[fl2r](T)[sp].[fl2r](G)[ |
| | sp].[fl2r](T)[sp].[fl2r](A)[sp].[fl2r]([m5C])[sp].[fl2r](T)[sp].[fl2r](T)[sp].[ |
| | fl2r]([m5C])[sp].[fl2r](A)[sp].[moe](T)[sp].[moe]([m5C])[sp].[lna]([m5C] |
| | )}$$$$V2.0 |
| 1387 | RNA1{[lna](T)[sp].[moe]([m5C])[sp].[moe](T)[sp].[moe](T)[sp].[fl2r](G) |
| | [sp].[fl2r](T)[sp].[fl2r](A)[sp].[fl2r]([m5C])[sp].[fl2r](T)[sp].[fl2r](T)[sp]. |
| | [fl2r]([m5C])[sp].[moe](A)[sp].[moe](T)[sp].[moe]([m5C])[sp].[lna]([m5 |
| | C])}$$$$V2.0 |
| 1388 | RNA1{[lna](T)[sp].[moe]([m5C])[sp].[moe](T)[sp].[moe](T)[sp].[moe](G |
| | )[sp].[fl2r](T)[sp].[fl2r](A)[sp].[fl2r]([m5C])[sp].[fl2r](T)[sp].[fl2r](T)[sp] |
| | .[moe]([m5C])[sp].[moe](A)[sp].[moe](T)[sp].[moe]([m5C])[sp].[lna]([m5 |
| | C])}$$$$V2.0 |
| 1389 | RNA1{[lna](T)[sp].[fl2r]([m5C])[sp].[fl2r](T)[sp].[fl2r](T)[sp].[fl2r](G)[s |
| | p].[fl2r](T)[sp].[moe](A)[sp].[moe]([m5C])[sp].[moe](T)[sp].[fl2r](T)[sp]. |
| | [fl2r]([m5C])[sp].[fl2r](A)[sp].[fl2r](T)[sp].[fl2r]([m5C])[sp].[lna]([m5C]) |
| | }$$$$V2.0 |
| 1390 | RNA1{[lna](T)[sp].[moe]([m5C])[sp].[fl2r](T)[sp].[fl2r](T)[sp].[fl2r](G)[ |
| | sp].[fl2r](T)[sp].[fl2r](A)[sp].[moe]([m5C])[sp].[fl2r](T)[sp].[fl2r](T)[sp]. |
| | [fl2r]([m5C])[sp].[fl2r](A)[sp].[fl2r](T)[sp].[moe]([m5C])[sp].[lna]([m5C] |
| | )}$$$$V2.0 |
| 1391 | RNA1{[lna](T)[sp].[moe]([m5C])[sp].[fl2r](T)[sp].[fl2r](T)[sp].[fl2r](G)[ |
| | sp].[fl2r](T)[sp].[moe](A)[sp].[moe]([m5C])[sp].[moe](T)[sp].[fl2r](T)[sp |
| | ].[fl2r]([m5C])[sp].[fl2r](A)[sp].[fl2r](T)[sp].[moe]([m5C])[sp].[lna]([m5 |
| | C])}$$$$V2.0 |
| 1392 | RNA1{[lna](T)[sp].[moe]([m5C])[sp].[moe](T)[sp].[fl2r](T)[sp].[fl2r](G)[ |
| | sp].[fl2r](T)[sp].[fl2r](A)[sp].[moe]([m5C])[sp].[fl2r](T)[sp].[fl2r](T)[sp]. |
| | [fl2r]([m5C])[sp].[fl2r](A)[sp].[moe](T)[sp].[moe]([m5C])[sp].[lna]([m5C |
| | ])}$$$$V2.0 |
| 1393 | RNA1{[lna](T)[sp].[fl2r]([m5C])[sp].[fl2r](T)[sp].[fl2r](T)[sp].[fl2r](G)[s |
| | p].[moe](T)[sp].[moe](A)[sp].[moe]([m5C])[sp].[moe](T)[sp].[moe](T)[sp |
| | ].[fl2r]([m5C])[sp].[fl2r](A)[sp].[fl2r](T)[sp].[fl2r]([m5C])[sp].[lna]([m5C |
| | ])}$$$$V2.0 |
| 1394 | RNA1{[lna](G)[sp].[fl2r](T)[sp].[fl2r](T)[sp].[fl2r]([m5C])[sp].[fl2r](T)[s |
| | p].[fl2r](T)[sp].[fl2r](G)[sp].[fl2r](T)[sp].[fl2r](A)[sp].[fl2r]([m5C])[sp].[f |
| | l2r](T)[sp].[fl2r](T)[sp].[fl2r]([m5C])[sp].[fl2r](A)[sp].[fl2r](T)[sp].[lna]([ |
| | m5C])}$$$$V2.0 |
| 1395 | RNA1{[lna](G)[sp].[moe](T)[sp].[fl2r](T)[sp].[fl2r]([m5C])[sp].[fl2r](T)[ |
| | sp].[fl2r](T)[sp].[fl2r](G)[sp].[fl2r](T)[sp].[fl2r](A)[sp].[fl2r]([m5C])[sp].[ |
| | fl2r](T)[sp].[fl2r](T)[sp].[fl2r]([m5C])[sp].[fl2r](A)[sp].[moe](T)[sp].[lna] |
| | ([m5C])}$$$$V2.0 |
| 1396 | RNA1{[lna](G)[sp].[moe](T)[sp].[moe](T)[sp].[fl2r]([m5C])[sp].[fl2r](T)[ |
| | sp].[fl2r](T)[sp].[fl2r](G)[sp].[fl2r](T)[sp].[fl2r](A)[sp].[fl2r]([m5C])[sp].[ |
| | fl2r](T)[sp].[fl2r](T)[sp].[fl2r]([m5C])[sp].[moe](A)[sp].[moe](T)[sp].[lna |
| | ]([m5C])}$$$$V2.0 |
| 1397 | RNA1{[lna](G)[sp].[moe](T)[sp].[moe](T)[sp].[moe]([m5C])[sp].[fl2r](T) |
| | [sp].[fl2r](T)[sp].[fl2r](G)[sp].[fl2r](T)[sp].[fl2r](A)[sp].[fl2r]([m5C])[sp]. |
| | [fl2r](T)[sp].[fl2r](T)[sp].[moe]([m5C])[sp].[moe](A)[sp].[moe](T)[sp].[ln |
| | a]([m5C])}$$$$V2.0 |
| 1398 | RNA1{[lna](G)[sp].[moe](T)[sp].[moe](T)[sp].[moe]([m5C])[sp].[moe](T |
| | )[sp].[fl2r](T)[sp].[fl2r](G)[sp].[fl2r](T)[sp].[fl2r](A)[sp].[fl2r]([m5C])[sp] |
| | .[fl2r](T)[sp].[moe](T)[sp].[moe]([m5C])[sp].[moe](A)[sp].[moe](T)[sp].[l |
| | na]([m5C])}$$$$V2.0 |
| 1399 | RNA1{[lna](G)[sp].[moe](T)[sp].[moe](T)[sp].[moe]([m5C])[sp].[moe](T |
| | )[sp].[moe](T)[sp].[fl2r](G)[sp].[fl2r](T)[sp].[fl2r](A)[sp].[fl2r]([m5C])[sp |
| | ].[moe](T)[sp].[moe](T)[sp].[moe]([m5C])[sp].[moe](A)[sp].[moe](T)[sp]. |
| | [lna]([m5C])}$$$$V2.0 |
| 1400 | RNA1{[lna](G)[sp].[fl2r](T)[sp].[fl2r](T)[sp].[fl2r]([m5C])[sp].[fl2r](T)[s |
| | p].[fl2r](T)[sp].[fl2r](G)[sp].[moe](T)[sp].[moe](A)[sp].[fl2r]([m5C])[sp]. |
| | [fl2r](T)[sp].[fl2r](T)[sp].[fl2r]([m5C])[sp].[fl2r](A)[sp].[fl2r](T)[sp].[lna] |
| | ([m5C])}$$$$V2.0 |
| 1401 | RNA1{[lna](G)[sp].[fl2r](T)[sp].[fl2r](T)[sp].[fl2r]([m5C])[sp].[fl2r](T)[s |
| | p].[fl2r](T)[sp].[moe](G)[sp].[moe](T)[sp].[moe](A)[sp].[moe]([m5C])[sp |
| | ].[fl2r](T)[sp].[fl2r](T)[sp].[fl2r]([m5C])[sp].[fl2r](A)[sp].[fl2r](T)[sp].[ln |
| | a]([m5C])}$$$$V2.0 |
| 1402 | RNA1{[lna](G)[sp].[moe](T)[sp].[fl2r](T)[sp].[fl2r]([m5C])[sp].[fl2r](T)[ |
| | sp].[fl2r](T)[sp].[fl2r](G)[sp].[moe](T)[sp].[moe](A)[sp].[fl2r]([m5C])[sp] |
| | .[fl2r](T)[sp].[fl2r](T)[sp].[fl2r]([m5C])[sp].[fl2r](A)[sp].[moe](T)[sp].[ln |
| | a]([m5C])}$$$$V2.0 |
| 1403 | RNA1{[lna](G)[sp].[moe](T)[sp].[moe](T)[sp].[fl2r]([m5C])[sp].[fl2r](T)[ |
| | sp].[fl2r](T)[sp].[fl2r](G)[sp].[moe](T)[sp].[moe](A)[sp].[fl2r]([m5C])[sp] |
| | .[fl2r](T)[sp].[fl2r](T)[sp].[fl2r]([m5C])[sp].[moe](A)[sp].[moe](T)[sp].[ln |
| | a]([m5C])}$$$$V2.0 |
| 1404 | RNA1{[lna](G)[sp].[moe](T)[sp].[fl2r](T)[sp].[fl2r]([m5C])[sp].[fl2r](T)[ |
| | sp].[fl2r](T)[sp].[moe](G)[sp].[moe](T)[sp].[moe](A)[sp].[moe]([m5C])[s |
| | p].[fl2r](T)[sp].[fl2r](T)[sp].[fl2r]([m5C])[sp].[fl2r](A)[sp].[moe](T)[sp].[] |
| | na]([m5C])}$$$$V2.0 |
| 1405 | RNA1{[lna](G)[sp].[fl2r](G)[sp].[fl2r](T)[sp].[fl2r](G)[sp].[fl2r](T)[sp].[fl |
| | 2r](T)[sp].[fl2r]([m5C])[sp].[fl2r](T)[sp].[fl2r](T)[sp].[fl2r](G)[sp].[fl2r]( |
| | T)[sp].[fl2r](A)[sp].[fl2r]([m5C])[sp].[fl2r](T)[sp].[fl2r](T)[sp].[lna]([m5 |
| | C])}$$$$V2.0 |
| 1406 | RNA1{[lna](G)[sp].[moe](G)[sp].[fl2r](T)[sp].[fl2r](G)[sp].[fl2r](T)[sp].[f |
| | l2r](T)[sp].[fl2r]([m5C])[sp].[fl2r](T)[sp].[fl2r](T)[sp].[fl2r](G)[sp].[fl2r]( |
| | T)[sp].[fl2r](A)[sp].[fl2r]([m5C])[sp].[fl2r](T)[sp].[moe](T)[sp].[lna]([m5 |
| | C])}$$$$V2.0 |
| 1407 | RNA1{[lna](G)[sp].[moe](G)[sp].[moe](T)[sp].[fl2r](G)[sp].[fl2r](T)[sp].[ |
| | fl2r](T)[sp].[fl2r]([m5C])[sp].[fl2r](T)[sp].[fl2r](T)[sp].[fl2r](G)[sp].[fl2r] |
| | (T)[sp].[fl2r](A)[sp].[fl2r]([m5C])[sp].[moe](T)[sp].[moe](T)[sp].[lna]([m |
| | 5C])}$$$$V2.0 |
| 1408 | RNA1{[lna](G)[sp].[moe](G)[sp].[moe](T)[sp].[moe](G)[sp].[fl2r](T)[sp]. |
| | [fl2r](T)[sp].[fl2r]([m5C])[sp].[fl2r](T)[sp].[fl2r](T)[sp].[fl2r](G)[sp].[fl2r |
| | ](T)[sp].[fl2r](A)[sp].[moe]([m5C])[sp].[moe](T)[sp].[moe](T)[sp].[lna]([ |
| | m5C])}$$$$V2.0 |
| 1409 | RNA1{[lna](G)[sp].[moe](G)[sp].[moe](T)[sp].[moe](G)[sp].[moe](T)[sp] |
| | .[fl2r](T)[sp].[fl2r]([m5C])[sp].[fl2r](T)[sp].[fl2r](T)[sp].[fl2r](G)[sp].[fl2r |
| | ](T)[sp].[moe](A)[sp].[moe]([m5C])[sp].[moe](T)[sp].[moe](T)[sp].[lna]([ |
| | m5C])}$$$$V2.0 |
| 1410 | RNA1{[lna](G)[sp].[moe](G)[sp].[moe](T)[sp].[moe](G)[sp].[moe](T)[sp] |
| | .[moe](T)[sp].[fl2r]([m5C])[sp].[fl2r](T)[sp].[fl2r](T)[sp].[fl2r](G)[sp].[m |
| | oe](T)[sp].[moe](A)[sp].[moe]([m5C])[sp].[moe](T)[sp].[moe](T)[sp].[lna |
| | ]([m5C])}$$$$V2.0 |
| 1411 | RNA1{[lna](G)[sp].[fl2r](G)[sp].[fl2r](T)[sp].[fl2r](G)[sp].[fl2r](T)[sp].[fl |
| | 2r](T)[sp].[fl2r]([m5C])[sp].[moe](T)[sp].[moe](T)[sp].[fl2r](G)[sp].[fl2r] |
| | (T)[sp].[fl2r](A)[sp].[fl2r]([m5C])[sp].[fl2r](T)[sp].[fl2r](T)[sp].[lna]([m5 |
| | C])}$$$$V2.0 |
| 1412 | RNA1{[lna](G)[sp].[fl2r](G)[sp].[fl2r](T)[sp].[fl2r](G)[sp].[fl2r](T)[sp].[fl |
| | 2r](T)[sp].[moe]([m5C])[sp].[moe](T)[sp].[moe](T)[sp].[moe](G)[sp].[fl2r |
| | ](T)[sp].[fl2r](A)[sp].[fl2r]([m5C])[sp].[fl2r](T)[sp].[fl2r](T)[sp].[lna]([m |
| | 5C])}$$$$V2.0 |
| 1413 | RNA1{[lna](G)[sp].[moe](G)[sp].[fl2r](T)[sp].[fl2r](G)[sp].[fl2r](T)[sp].[f |
| | l2r](T)[sp].[fl2r]([m5C])[sp].[moe](T)[sp].[moe](T)[sp].[fl2r](G)[sp].[fl2r] |
| | (T)[sp].[fl2r](A)[sp].[fl2r]([m5C])[sp].[fl2r](T)[sp].[moe](T)[sp].[lna]([m5 |
| | C])}$$$$V2.0 |
| 1414 | RNA1{[lna](G)[sp].[moe](G)[sp].[moe](T)[sp].[fl2r](G)[sp].[fl2r](T)[sp].[ |
| | fl2r](T)[sp].[fl2r]([m5C])[sp].[moe](T)[sp].[moe](T)[sp].[fl2r](G)[sp].[fl2r |
| | ](T)[sp].[fl2r](A)[sp].[fl2r]([m5C])[sp].[moe](T)[sp].[moe](T)[sp].[lna]([ |
| | m5C])}$$$$V2.0 |
| 1415 | RNA1{[lna](G)[sp].[moe](G)[sp].[fl2r](T)[sp].[fl2r](G)[sp].[fl2r](T)[sp].[f |
| | l2r](T)[sp].[moe]([m5C])[sp].[moe](T)[sp].[moe](T)[sp].[moe](G)[sp].[fl2 |
| | r](T)[sp].[fl2r](A)[sp].[fl2r]([m5C])[sp].[fl2r](T)[sp].[moe](T)[sp].[lna]([ |
| | m5C])}$$$$V2.0 |
| 1416 | RNA1{[lna]([m5C])[sp].[moe](T)[sp].[moe](G)[sp].[moe](A)[sp].[moe]( |
| | A)[sp].[moe](T)[sp].[moe](T)[sp].[moe]([m5C])[sp].[moe](T)[sp].[moe](T |
| | )[sp].[moe](T)[sp].[moe]([m5C])[sp].[moe](A)[sp].[moe](A)[sp].[moe]([m |
| | 5C])[sp].[moe](T)[sp].[moe](A)[sp].[moe](G)}$$$$V2.0 |
| 1417 | RNA1{[moe]([m5C])[sp].[moe](T)[sp].[moe](G)[sp].[moe](A)[sp].[moe]( |
| | A)[sp].[moe](T)[sp].[moe](T)[sp].[moe]([m5C])[sp].[moe](T)[sp].[moe](T |
| | )[sp].[moe](T)[sp].[moe]([m5C])[sp].[moe](A)[sp].[moe](A)[sp].[moe]([m |
| | 5C])[sp].[moe](T)[sp].[moe](A)[sp].[lna](G)}$$$$V2.0 |
| 1418 | RNA1{[lna]([m5C])[sp].[moe](T)[sp].[moe](G)[sp].[moe](A)[sp].[moe]( |
| | A)[sp].[moe](T)[sp].[moe](T)[sp].[moe]([m5C])[sp].[moe](T)[sp].[moe](T |
| | )[sp].[moe](T)[sp].[moe]([m5C])[sp].[moe](A)[sp].[moe](A)[sp].[moe]([m |
| | 5C])[sp].[moe](T)[sp].[moe](A)[sp].[lna](G)}$$$$V2.0 |
| 1419 | RNA1{[lna]([m5C])[sp].[lna](T)[sp].[moe](G)[sp].[moe](A)[sp].[moe](A) |
| | [sp].[moe](T)[sp].[moe](T)[sp].[moe]([m5C])[sp].[moe](T)[sp].[moe](T)[s |
| | p].[moe](T)[sp].[moe]([m5C])[sp].[moe](A)[sp].[moe](A)[sp].[moe]([m5 |
| | C])[sp].[moe](T)[sp].[moe](A)[sp].[moe](G)}$$$$V2.0 |
| 1420 | RNA1{[moe]([m5C])[sp].[moe](T)[sp].[moe](G)[sp].[moe](A)[sp].[moe]( |
| | A)[sp].[moe](T)[sp].[moe](T)[sp].[moe]([m5C])[sp].[moe](T)[sp].[moe](T |
| | )[sp].[moe](T)[sp].[moe]([m5C])[sp].[moe](A)[sp].[moe](A)[sp].[moe]([m |
| | 5C])[sp].[moe](T)[sp].[lna](A)[sp].[lna](G)}$$$$V2.0 |
| 1421 | RNA1{[lna]([m5C])[sp].[moe](T)[sp].[moe](G)[sp].[moe](A)[sp].[moe]( |
| | A)[sp].[moe](T)[sp].[moe](T)[sp].[moe]([m5C])[sp].[moe](T)[sp].[moe](T |
| | )[sp].[moe](T)[sp].[moe]([m5C])[sp].[moe](A)[sp].[moe](A)[sp].[moe]([m |
| | 5C])[sp].[moe](T)[sp].[lna](A)[sp].[lna](G)}$$$$V2.0 |
| 1422 | RNA1{[lna]([m5C])[sp].[lna](T)[sp].[moe](G)[sp].[moe](A)[sp].[moe](A) |
| | [sp].[moe](T)[sp].[moe](T)[sp].[moe]([m5C])[sp].[moe](T)[sp].[moe](T)[s |
| | p].[moe](T)[sp].[moe]([m5C])[sp].[moe](A)[sp].[moe](A)[sp].[moe]([m5 |
| | C])[sp].[moe](T)[sp].[moe](A)[sp].[lna](G)}$$$$V2.0 |
| 1423 | RNA1{[lna](G)[sp].[moe](A)[sp].[moe](T)[sp].[moe](T)[sp].[moe]([m5C] |
| | )[sp].[moe](T)[sp].[moe](G)[sp].[moe](A)[sp].[moe](A)[sp].[moe](T)[sp]. |
| | [moe](T)[sp].[moe]([m5C])[sp].[moe](T)[sp].[moe](T)[sp].[moe](T)[sp].[ |
| | moe]([m5C])[sp].[moe](A)[sp].[moe](A)[sp].[moe]([m5C])[sp].[moe](T)} |
| | $$$$V2.0 |
| 1424 | RNA1{[moe](G)[sp].[moe](A)[sp].[moe](T)[sp].[moe](T)[sp].[moe]([m5 |
| | C])[sp].[moe](T)[sp].[moe](G)[sp].[moe](A)[sp].[moe](A)[sp].[moe](T)[s |
| | p].[moe](T)[sp].[moe]([m5C])[sp].[moe](T)[sp].[moe](T)[sp].[moe](T)[sp |
| | ].[moe]([m5C])[sp].[moe](A)[sp].[moe](A)[sp].[moe]([m5C])[sp].[lna](T) |
| | }$$$$V2.0 |
| 1425 | RNA1{[lna](G)[sp].[moe](A)[sp].[moe](T)[sp].[moe](T)[sp].[moe]([m5C] |
| | )[sp].[moe](T)[sp].[moe](G)[sp].[moe](A)[sp].[moe](A)[sp].[moe](T)[sp]. |
| | [moe](T)[sp].[moe]([m5C])[sp].[moe](T)[sp].[moe](T)[sp].[moe](T)[sp].[ |
| | moe]([m5C])[sp].[moe](A)[sp].[moe](A)[sp].[moe]([m5C])[sp].[lna](T)}$ |
| | $$$V2.0 |
| 1426 | RNA1{[lna](G)[sp].[lna](A)[sp].[moe](T)[sp].[moe](T)[sp].[moe]([m5C]) |
| | [sp].[moe](T)[sp].[moe](G)[sp].[moe](A)[sp].[moe](A)[sp].[moe](T)[sp].[ |
| | moe](T)[sp].[moe]([m5C])[sp].[moe](T)[sp].[moe](T)[sp].[moe](T)[sp].[ |
| | moe]([m5C])[sp].[moe](A)[sp].[moe](A)[sp].[moe]([m5C])[sp].[moe](T)} |
| | $$$$V2.0 |
| 1427 | RNA1{[moe](G)[sp].[moe](A)[sp].[moe](T)[sp].[moe](T)[sp].[moe]([m5 |
| | C])[sp].[moe](T)[sp].[moe](G)[sp].[moe](A)[sp].[moe](A)[sp].[moe](T)[s |
| | p].[moe](T)[sp].[moe]([m5C])[sp].[moe](T)[sp].[moe](T)[sp].[moe](T)[sp |
| | ].[moe]([m5C])[sp].[moe](A)[sp].[moe](A)[sp].[lna]([m5C])[sp].[lna](T)} |
| | $$$$V2.0 |
| 1428 | RNA1{[lna](G)[sp].[lna](A)[sp].[moe](T)[sp].[moe](T)[sp].[moe]([m5C]) |
| | [sp].[moe](T)[sp].[moe](G)[sp].[moe](A)[sp].[moe](A)[sp].[moe](T)[sp].[ |
| | moe](T)[sp].[moe]([m5C])[sp].[moe](T)[sp].[moe](T)[sp].[moe](T)[sp].[ |
| | moe]([m5C])[sp].[moe](A)[sp].[moe](A)[sp].[lna]([m5C])[sp].[lna](T)}$$ |
| | $$V2.0 |
| 1429 | RNA1{[lna](G)[sp].[moe](A)[sp].[moe](T)[sp].[moe](T)[sp].[moe]([m5C] |
| | )[sp].[moe](T)[sp].[moe](G)[sp].[moe](A)[sp].[moe](A)[sp].[moe](T)[sp]. |
| | [moe](T)[sp].[moe]([m5C])[sp].[moe](T)[sp].[moe](T)[sp].[moe](T)[sp].[ |
| | moe]([m5C])[sp].[moe](A)[sp].[moe](A)[sp].[lna]([m5C])[sp].[lna](T)}$$ |
| | $$V2.0 |
| 1430 | RNA1{[lna](G)[sp].[lna](A)[sp].[moe](T)[sp].[moe](T)[sp].[moe]([m5C]) |
| | [sp].[moe](T)[sp].[moe](G)[sp].[moe](A)[sp].[moe](A)[sp].[moe](T)[sp].[ |
| | moe](T)[sp].[moe]([m5C])[sp].[moe](T)[sp].[moe](T)[sp].[moe](T)[sp].[ |
| | moe]([m5C])[sp].[moe](A)[sp].[moe](A)[sp].[moe]([m5C])[sp].[lna](T)}$ |
| | $$$V2.0 |
| 1431 | RNA1{[lna](T)[sp].[moe](T)[sp].[moe]([m5C])[sp].[moe](T)[sp].[moe](G |
| | )[sp].[moe](A)[sp].[moe](A)[sp].[moe](T)[sp].[moe](T)[sp].[moe]([m5C]) |
| | [sp].[moe](T)[sp].[moe](T)[sp].[moe](T)[sp].[moe]([m5C])[sp].[moe](A)[ |
| | sp].[moe](A)[sp].[moe]([m5C])[sp].[moe](T)}$$$$V2.0 |
| 1432 | RNA1{[moe](T)[sp].[moe](T)[sp].[moe]([m5C])[sp].[moe](T)[sp].[moe]( |
| | G)[sp].[moe](A)[sp].[moe](A)[sp].[moe](T)[sp].[moe](T)[sp].[moe]([m5C |
| | ])[sp].[moe](T)[sp].[moe](T)[sp].[moe](T)[sp].[moe]([m5C])[sp].[moe](A |
| | )[sp].[moe](A)[sp].[moe]([m5C])[sp].[lna](T)}$$$$V2.0 |
| 1433 | RNA1{[lna](T)[sp].[lna](T)[sp].[moe]([m5C])[sp].[moe](T)[sp].[moe](G)[ |
| | sp].[moe](A)[sp].[moe](A)[sp].[moe](T)[sp].[moe](T)[sp].[moe]([m5C])[s |
| | p].[moe](T)[sp].[moe](T)[sp].[moe](T)[sp].[moe]([m5C])[sp].[moe](A)[sp |
| | ].[moe](A)[sp].[moe]([m5C])[sp].[moe](T)}$$$$V2.0 |
| 1434 | RNA1{[moe](T)[sp].[moe](T)[sp].[moe]([m5C])[sp].[moe](T)[sp].[moe]( |
| | G)[sp].[moe](A)[sp].[moe](A)[sp].[moe](T)[sp].[moe](T)[sp].[moe]([m5C |
| | ])[sp].[moe](T)[sp].[moe](T)[sp].[moe](T)[sp].[moe]([m5C])[sp].[moe](A |
| | )[sp].[moe](A)[sp].[lna]([m5C])[sp].[lna](T)}$$$$V2.0 |
| 1435 | RNA1{[lna](T)[sp].[moe](T)[sp].[moe]([m5C])[sp].[moe](T)[sp].[moe](G |
| | )[sp].[moe](A)[sp].[moe](A)[sp].[moe](T)[sp].[moe](T)[sp].[moe]([m5C]) |
| | [sp].[moe](T)[sp].[moe](T)[sp].[moe](T)[sp].[moe]([m5C])[sp].[moe](A)[ |
| | sp].[moe](A)[sp].[lna]([m5C])[sp].[lna](T)}$$$$V2.0 |
| 1436 | RNA1{[lna](T)[sp].[lna](T)[sp].[moe]([m5C])[sp].[moe](T)[sp].[moe](G)[ |
| | sp].[moe](A)[sp].[moe](A)[sp].[moe](T)[sp].[moe](T)[sp].[moe]([m5C])[s |
| | p].[moe](T)[sp].[moe](T)[sp].[moe](T)[sp].[moe]([m5C])[sp].[moe](A)[sp |
| | ].[moe](A)[sp].[moe]([m5C])[sp].[lna](T)}$$$$V2.0 |

[0061] In another embodiment, a hydroxyalkoxy group, or at least one hydroxyalkoxy group, or all hydroxyalkoxy groups, used in the ASO provided herein comprises or consists of an ethylene glycol monomer, ethylene glycol oligomer or ethylene glycol polymer (also known as polyethylene glycol, PEG). In one embodiment, the linkage between the ASO and a hydroxyalkoxy group is covalent.

[0062] PEGylation, i.e., the attachment of (chemically activated) hydroxyalkoxy groups, including ethylene glycol monomers or chains, is well known to a person skilled in the art. PEGylation can be done at the —OH group of the 5′ terminal monomer and/or the 3′ terminal monomer of a nucleic acid. This can be done directly or through a spacer (e.g. aminoalkyl hydroxyalkoxy group), for example by click chemistry as known by the person skilled in the art.

[0063] Also encompassed is the use of modified hydroxyalkoxy groups including modified PEGylation, wherein said (poly)ethylene glycol is chemically modified and/or contains a moiety attached thereto. In this way said hydroxyalkoxy group acquires an additional property as known in the art. For example, said hydroxyalkoxy group may become cleavable or fluorescent. An example of modified PEGylation includes but is not limited to cleavable PEGylation, wherein the linkage is a degradable (cleavable) linkage. Examples include linkages that are responsive to, for example, pH, light, temperature, reductive or oxidative environments, nucleophiles, synthetic reagents, enzymes, proteases, cathepsin, click-to-release reactions or (other) external stimuli.

[0064] Also encompassed is the use of modified hydroxyalkoxy polymers such as derivatized PEG scaffolds or PEG-biomimetics and architectures thereof including but not limited to linear and diblock forms, radiant-stars with variable arms, dendrimers, bottlebrush, and hyperbranched, wherein said (poly)ethylene glycol is chemically modified and/or contains a moiety for bioconjugation to oligonucleotides of interest. In this way, the polymer-modified oligonucleotide possesses improved delivery parameters such as half-life and durability, oligonucleotide tolerability and safety, and tissue biodistribution as demonstrated by others (see, e.g., Wang et al. Science Advances 2019, 5 (2), www.science.org/doi/10.1126/sciadv.aav9322). An example of modified PEGylation includes but is not limited to cleavable PEGylation, wherein the linkage between the PEG and the oligonucleotide is a degradable linker. Examples include linkages that are responsive to pH, reductive or oxidative environments, enzymes, proteases, cathepsin, or other external stimuli. Other linker considerations include spacers to enhance oligo solubility, access, and binding, and/or functionalities to enable additional elements for delivery. In addition, the polymer scaffold can also be designed to increase oligonucleotide drug densities and ratios for dosing and/or multimerization of targeting ligands to provide high-avidity interactions. These can happen in the form of either statistical distribution of pendant arms or with defined branches and arms with the polymer backbone. Examples of muscle targeting include formats of: RGD peptides (e.g., cyclic and linear), transferrin receptor antibodies (e.g. mAb, Fab″, Fab′, ScFv, aptamers, peptides), and other muscle-specific peptides as demonstrated by others (See, e.g., Gao et al. Mol. Ther. 2014, 22 (7), 1333-1341, www.cell.com/molecular-therapy-family/molecular-therapy/fulltext/S1525-0016 (16) 30724-9; Jativa, et al. Mol. Pharm. 2019, 16 (6), 2376-2384, www.ncbi.nlm.nih.gov/pmc/articles/PMC8008946/; Ruoslahti Ann. Rev. Cell Dev. Biol. 1996, 12, 697-715, 10.1146/annurev.cellbio. 12.1.697; Tabebordbar, et al. Cell 2021, 184 (19), 4919-4938, 10.1016/j.cell.2021.08.028; Desjardins, et al. Nucl. Acids Res. 2022, 50 (20), 11401-11414, 10.1093/nar/gkac641; Malecova, et al. Nucl. Acids Res. 2023, 51 (12), 5901-5910, 10.1093/nar/gkad415; and Sugo, et al. J. Control. Rel. 2016, 237, 1-13, 10.1016/j.jconrel.2016.06.036.

[0065] In one embodiment, the hydroxyalkoxy group is an unmodified ethylene glycol monomer, ethylene glycol oligomer or ethylene glycol polymer. In another embodiment, the hydroxyalkoxy group is a modified ethylene glycol monomer, ethylene glycol oligomer or ethylene glycol polymer (e.g., modified PEG).

[0066] In one embodiment, a hydroxyalkoxy group for use in the ASOs provided herein comprises or consists of 1, 2, 3, 4, 5, 6, 7, 8, 9, 10, 11, 12, 13, 14, 15, 16, 17, 18, 19 or 20 ethylene glycol monomers. In some embodiments, the hydroxyalkoxy group comprises or consists of 1 to 20, 1 to 16, 1 to 12, 1 to 8, 1 to 6, 2 to 16, 2 to 12, 2 to 8, 2 to 6, 3 to 12, 3 to 8 or 3 to 6 ethylene glycol monomers. In some embodiments, the hydroxyalkoxy group comprises or consists of 1, 2, 3, 4, 5, 6, 7, 8, 9, 10, 11 or 12 ethylene glycol monomers. In some embodiments, the hydroxyalkoxy group comprises or consists of 3, 4, 5 or 6 ethylene glycol monomers. In some embodiments, the hydroxyalkoxy group comprises or consists of 3 or 6 ethylene glycol monomers. In some embodiments, the hydroxyalkoxy group comprises or consists of 3 ethylene glycol monomers.

[0067] In one embodiment, the hydroxyalkoxy group is a diethylene glycol, triethylene glycol (TEG), tetraethylene glycol, pentaethylene glycol or hexacthylene glycol (HEG) group. In some embodiments, the hydroxyalkoxy group is TEG or HEG. In some embodiments, the hydroxyalkoxy group is TEG. In some embodiments, the hydroxyalkoxy group is HEG.

[0068] In the ASOs provided herein, a hydroxyalkoxy group may be attached to the ASO using methods well known to those of skill in the art. For example, the 5′- and/or 3′-terminal OH of the ASO may be derivatized as a phosphoramidite, chloroformate, chloramidate or thiophosphoramidite, which is then reacted with the hydroxyalkoxy group (e.g., diethylene glycol, tricthylene glycol (TEG), tetracthylene glycol, pentacthylene glycol or hexacthylene glycol (HEG)) under standard coupling conditions to provide a hydroxyalkoxylated ASO. Alternatively, the OH of the hydroxyalkoxy group (e.g., dicthylene glycol, tricthylene glycol (TEG), tetracthylene glycol, pentacthylene glycol or hexacthylene glycol (HEG)) is derivatized as a phosphoramidite, chloroformate, chloramidate or thiophosphoramidite, which is then reacted with the 5′- and/or 3′-terminal OH of the ASO under standard coupling conditions to provide a hydroxyalkoxylated ASO.

[0069] In one embodiment, a hydroxyalkoxy group is attached to the ASO through a phosphate linker (PO). In another embodiment, the hydroxyalkoxy group is a TEG group and the hydroxyalkoxylated ASO is TEG-PO-ASO (i.e., HO(CH₂CH₂O)₃—P(O)(OH)-ASO), where the TEG-PO is attached to the 5′-OH of the ASO. In another embodiment, the hydroxyalkoxy group is a TEG group and the hydroxyalkoxylated ASO is TEG-PO-ASO, where the TEG-PO is attached to the 3′-OH of the ASO. In another embodiment, two TEG groups are attached to the ASO, one at the 3′-OH and the other at the 5′-OH, and the hydroxyalkoxylated ASO is (TEG-PO)₂-ASO.

[0070] In another embodiment, a hydroxyalkoxy group is attached to the ASO through a phosphorothioate linker (PS). In another embodiment, the hydroxyalkoxy group is a TEG group and the hydroxyalkoxylated ASO is TEG-PS-ASO (i.e., HO(CH₂CH₂O)₃—P(S)(OH)-ASO), where the TEG-PS is attached to the 5′-OH of the ASO. In another embodiment, the hydroxyalkoxy group is a TEG group and the hydroxyalkoxylated ASO is TEG-PS-ASO, where the TEG-PS is attached to the 3′-OH of the ASO. In another embodiment, two TEG groups are attached to the ASO, one at the 3′-OH and the other at the 5′-OH, and the hydroxyalkoxylated ASO is (TEG-PS)₂-ASO.

[0071] In another embodiment, two TEG groups are attached to the ASO, one at the 3′-OH and the other at the 5′-OH, and the hydroxyalkoxylated ASO is TEG-PO-ASO-PS-TEG; where TEG-PO is at 5′ and TEG-PS is at 3′; or where TEG-PO is at 3′ and TEG-PS is at 5′.

[0072] In another embodiment, the hydroxyalkoxy group is a HEG group and the hydroxyalkoxylated ASO is HEG-PO-ASO (i.e., HO(CH₂CH₂O)₆—P(O)(OH)-ASO), where the HEG-PO is attached to the 5′-OH of the ASO. In another embodiment, the hydroxyalkoxy group is a HEG group and the hydroxyalkoxylated ASO is HEG-PO-ASO, where the HEG-PO is attached to the 3′-OH of the ASO. In another embodiment, two HEG groups are attached to the ASO, one at the 3′-OH and the other at the 5′-OH, and the hydroxyalkoxylated ASO is (HEG-PO) 2-ASO.

[0073] In another embodiment, the hydroxyalkoxy group is a HEG group and the hydroxyalkoxylated ASO is HEG-PS-ASO (i.e., HO(CH₂CH₂O)₆—P(S)(OH)-ASO), where the HEG-PS is attached to the 5′-OH of the ASO. In another embodiment, the hydroxyalkoxy group is a HEG group and the hydroxyalkoxylated ASO is HEG-PS-ASO, where the HEG-PS is attached to the 3′-OH of the ASO. In another embodiment, two HEG groups are attached to the ASO, one at the 3′-OH and the other at the 5′-OH, and the hydroxyalkoxylated ASO is (HEG-PS)₂-ASO.

[0074] In another embodiment, two HEG groups are attached to the ASO, one at the 3′-OH and the other at the 5′-OH, and the hydroxyalkoxylated ASO is HEG-PO-ASO-PS-HEG; where HEG-PO is at 5′ and HEG-PS is at 3′; or where HEG-PO is at 3′ and HEG-PS is at 5′. In another embodiment, one TEG and one HEG group are attached to the ASO, one at the 3′-OH and the other at the 5′-OH, and the hydroxyalkoxylated ASO is TEG-PO-ASO—PS-HEG; where TEG-PO is at 5′ and HEG-PS is at 3′; or where TEG-PO is at 3′ and HEG-PS is at 5′. In another embodiment, one TEG and one HEG group are attached to the ASO, one at the 3′-OH and the other at the 5′-OH, and the hydroxyalkoxylated ASO is HEG-PO-ASO-PS-TEG; where HEG-PO is at 5′ and TEG-PS is at 3′; or where HEG-PO is at 3′ and TEG-PS is at 5′.

[0075] In another embodiment, the ASOs provided herein have or contain the sequence of SEQ ID NO: 11, 16, 76, 77, 78, 79, 80, 81, 110, 111, 112, 113, 114, 115, 177, 178, 179, 180, 181, 182, 183, 184, 185, 186, 187, 188, 189, 190, 191, 192, 193, 194, 195, 196, 197, 198, 199, 200, 201, 202, 203, 204, 205, 206, 207, 208, 249, 250, 251, 252, 265, 266, 267, 268, 269, 270, 271, 272, 273, 274, 275, 276, 277, 278, 279, 295, 296, 297, 298, 324, 325, 326, 327, 328, 329, 330 or 331. In another embodiment, the ASOs provided herein have or contain the sequence of SEQ ID NO: 11, 16, 76, 77, 78, 79, 80, 81, 110, 111, 112, 113, 114, 115, 177, 178, 179, 180, 181, 182, 183, 184, 185, 186, 187, 188, 189, 190, 191, 192, 193, 194, 195, 196, 197, 198, 199, 200, 201, 202, 203, 204, 205, 206, 207, 208, 249, 250, 251, 252, 265, 266, 267, 268, 269, 270, 271, 272, 273, 274, 275, 276, 277, 278, 279, 295, 296, 297, 298, 324, 325, 326, 327, 328, 329, 330 or 331 where all thymine bases are replaced with uracil.

[0076] In another embodiment, the ASOs provided herein have or contain the sequence of SEQ ID NO: 347, 401, 413, 452, 453, 454, 455, 456, 457, 470, 539, 540, 592, 593, 594, 595, 596, 597, 612, 613, 614, 624, 625, 626, 627, 652, 762, 809, 811, 828, 829, 830, 831, 832, 836, 847, 848, 849, 850, 851, 852, 853, 854, 855, 856, 857, 858, 859 or 860.

[0077] In one embodiment, the ASOs provided herein have one of the sequences provided herein where one or two nucleotides are omitted from the 5′ terminus of the ASO, or where one or two nucleotides are omitted from the 3′ terminus of the ASO, or where one nucleotide is omitted from the 5′ terminus of the ASO and one nucleotide is omitted from the 3′ terminus of the ASO. Thus, in this embodiment, the ASOs provided herein are 16-mers or 17-mers.

[0078] In another embodiment, the ASOs provided herein contain one of the sequences provided herein or contain a 16-mer or 17-mer as described above, and are 16 to 30 nucleotides in length. In such embodiments, one of skill in the art would readily be able to determine, based on the well-known sequence of human dystrophin exon 53, which nucleotides to add to the 5′ and/or 3′ terminus of the sequence provided herein, and in what order, in order to obtain ASOs longer than 18 nucleotides up to 30 nucleotides in length that are 90%, 95%, 96%, 97%, 98%, 99% or 100% reverse complementary to a portion of human dystrophin exon 53. Such longer ASOs are within the scope of this disclosure. In another embodiment, the ASOs provided herein are 16 to 25 nucleotides in length. In another embodiment, the ASOs provided herein are 16 to 20 nucleotides in length. In another embodiment, the ASOs provided herein are 16, 17, 18, 19 or 20 nucleotides in length. In another embodiment, the ASOs provided herein are 18 nucleotides in length.

[0079] The ASOs provided herein may be synthesized using standard solid phase oligonucleotide synthesis techniques. For example, the ASOs may be synthesized using either an OP-10 synthesizer (GE/ÄKTA Oligopilot) or a MerMade 12 Synthesizer (BioAutomation), through standard phosphoramidite protocols. The ASOs may be cleaved and deprotected in a two-step sequence (e.g., DEA followed by conc. NH₄OH treatment), purified by anion-exchange chromatography, desalted by size exclusion chromatography and lyophilized.

### III. Pharmaceutical Compositions

[0080] The pharmaceutical compositions provided herein contain therapeutically effective amounts of one or more of the ASOs provided herein and a pharmaceutically acceptable carrier, diluent or excipient.

[0081] The ASOs can be formulated into suitable pharmaceutical preparations such as solutions, suspensions, powders, in sterile solutions or suspensions for ophthalmic or parenteral administration, as well as transdermal patch preparation. Typically, the ASOs described herein are formulated into pharmaceutical compositions using techniques and procedures well known in the art (see, e.g., Ansel Introduction to Pharmaceutical Dosage Forms, Seventh Edition 1999).

[0082] In the compositions, effective concentrations of one or more compounds or pharmaceutically acceptable salts is (are) mixed with a suitable pharmaceutical carrier or vehicle. In certain embodiments, the concentrations of the ASOs in the compositions are effective for delivery of an amount, upon administration, that treats, prevents, or ameliorates one or more of the symptoms and/or progression of a disease or disorder disclosed herein.

[0083] Typically, the compositions are formulated for single dosage administration. To formulate a composition, the weight fraction of compound is dissolved, suspended, dispersed or otherwise mixed in a selected vehicle at an effective concentration such that the treated condition is relieved or ameliorated. Pharmaceutical carriers or vehicles suitable for administration of the ASOs provided herein include any such carriers known to those skilled in the art to be suitable for the particular mode of administration.

[0084] In addition, the ASOs may be formulated as the sole pharmaceutically active ingredient in the composition or may be combined with other active ingredients. Liposomal suspensions, including tissue-targeted liposomes, may also be suitable as pharmaceutically acceptable carriers. These may be prepared according to methods known to those skilled in the art. For example, liposome formulations may be prepared as known in the art. Briefly, liposomes such as multilamellar vesicles (MLV's) may be formed by drying down egg phosphatidyl choline and brain phosphatidyl serine (7:3 molar ratio) on the inside of a flask. A solution of a compound provided herein in phosphate buffered saline lacking divalent cations (PBS) is added and the flask shaken until the lipid film is dispersed. The resulting vesicles are washed to remove unencapsulated compound, pelleted by centrifugation, and then resuspended in PBS.

[0085] The active compound is included in the pharmaceutically acceptable carrier in an amount sufficient to exert a therapeutically useful effect in the absence of undesirable side effects on the subject treated. The therapeutically effective concentration may be determined empirically by testing the ASOs in in vitro and in vivo systems described herein and then extrapolated therefrom for dosages for humans. In some embodiments, the ASO is administered in a method to achieve a therapeutically effective concentration of the drug. In some embodiments, a companion diagnostic (see, e.g., Olsen D and Jorgensen J T, Front. Oncol., 2014 May 16, 4:105, doi: 10.3389/fonC.2014.00105) is used to determine the therapeutic concentration and safety profile of the active compound in specific subjects or subject populations.

[0086] The concentration of ASO in the pharmaceutical composition will depend on absorption, tissue distribution, inactivation and excretion rates of the active compound, the physicochemical characteristics of the compound, the dosage schedule, and amount administered as well as other factors known to those of skill in the art. For example, the amount that is delivered is sufficient to ameliorate one or more of the symptoms of a disease or disorder disclosed herein.

[0087] In certain embodiments, a therapeutically effective dosage should produce a serum concentration of active ingredient of from about 0.1 ng/mL to about 50-100 μg/mL. In one embodiment, the pharmaceutical compositions provide a dosage of from about 0.001 mg to about 2000 mg of compound per kilogram of body weight per day. Pharmaceutical dosage unit forms are prepared to provide from about 1 mg to about 1000 mg and in certain embodiments, from about 10 to about 500 mg of the essential active ingredient or a combination of essential ingredients per dosage unit form.

[0088] The ASO may be administered at once or may be divided into a number of smaller doses to be administered at intervals of time. It is understood that the precise dosage and duration of treatment is a function of the disease being treated and may be determined empirically using known testing protocols or by extrapolation from in vivo or in vitro test data. It is to be noted that concentrations and dosage values may also vary with the severity of the condition to be alleviated. It is to be further understood that for any particular subject, specific dosage regimens should be adjusted over time according to the individual need and the professional judgment of the person administering or supervising the administration of the compositions, and that the concentration ranges set forth herein are exemplary only and are not intended to limit the scope or practice of the claimed compositions.

[0089] Thus, effective concentrations or amounts of one or more of the ASOs described herein or pharmaceutically acceptable salts thereof are mixed with a suitable pharmaceutical carrier or vehicle for systemic, topical or local administration to form pharmaceutical compositions. ASOs are included in an amount effective for ameliorating one or more symptoms of, or for treating, retarding progression, or preventing. The concentration of active compound in the composition will depend on absorption, tissue distribution, inactivation, excretion rates of the active compound, the dosage schedule, amount administered, particular formulation as well as other factors known to those of skill in the art.

[0090] The compositions are intended to be administered by a suitable route, including but not limited to parenteral, subcutaneous, intravenous, intramuscular, intraperitoneal, intrathecal, dermal, transdermal or buccal.

[0091] Solutions or suspensions used for parenteral, intradermal or subcutaneous application can include any of the following components: a sterile diluent, such as water for injection, saline solution, fixed oil, polyethylene glycol, glycerin, propylene glycol, dimethyl acetamide or other synthetic solvent; antimicrobial agents, such as benzyl alcohol and methyl parabens; antioxidants, such as ascorbic acid and sodium bisulfite; chelating agents, such as ethylenediaminetetraacetic acid (EDTA); buffers, such as acetates, citrates and phosphates; and agents for the adjustment of tonicity such as sodium chloride or dextrose. Parenteral preparations can be enclosed in ampules, pens, disposable syringes or single or multiple dose vials made of glass, plastic or other suitable material.

[0092] In instances in which the ASOs exhibit insufficient solubility, methods for solubilizing ASOs may be used. Such methods are known to those of skill in this art, and include, but are not limited to, using cosolvents, such as dimethylsulfoxide (DMSO), using surfactants, such as TWEEN®, or dissolution in aqueous sodium bicarbonate.

[0093] Upon mixing or addition of the ASO(s), the resulting mixture may be a solution, suspension, emulsion or the like. The form of the resulting mixture depends upon a number of factors, including the intended mode of administration and the solubility of the ASO in the selected carrier or vehicle. The effective concentration is sufficient for ameliorating the symptoms of the disease, disorder or condition treated and may be empirically determined.

[0094] The pharmaceutical compositions are provided for administration to humans and animals in unit dosage forms, such as powders, granules, sterile parenteral solutions or suspensions, and oil water emulsions containing suitable quantities of the ASOs or pharmaceutically acceptable salts thereof. The pharmaceutically therapeutically active ASOs and salts thereof are formulated and administered in unit dosage forms or multiple dosage forms. Unit dose forms as used herein refer to physically discrete units suitable for human and animal subjects and packaged individually as is known in the art. Each unit dose contains a predetermined quantity of the therapeutically active compound sufficient to produce the desired therapeutic effect, in association with the required pharmaceutical carrier, vehicle or diluent. Examples of unit dose forms include ampules and syringes and individually packaged tablets or capsules. Unit dose forms may be administered in fractions or multiples thereof. A multiple dose form is a plurality of identical unit dosage forms packaged in a single container to be administered in segregated unit dose form. Examples of multiple dose forms include vials, bottles of tablets or capsules or bottles of pints or gallons. Hence, multiple dose form is a multiple of unit doses which are not segregated in packaging.

[0095] Sustained-release preparations can also be prepared. Suitable examples of sustained-release preparations include semipermeable matrices of solid hydrophobic polymers containing the compound provided herein, which matrices are in the form of shaped articles, e.g., films, or microcapsule. Examples of sustained-release matrices include iontophoresis patches, polyesters, hydrogels (for example, poly (2-hydroxyethyl-methacrylate), or poly(vinylalcohol)), polylactides, copolymers of L-glutamic acid and ethyl-L-glutamate, non-degradable ethylene-vinyl acetate, degradable lactic acid-glycolic acid copolymers such as the LUPRON DEPOT™ (injectable microspheres composed of lactic acid-glycolic acid copolymer and leuprolide acetate), and poly-D-(−)-3-hydroxybutyric acid. While polymers such as ethylene-vinyl acetate and lactic acid-glycolic acid enable release of molecules for over 100 days, certain hydrogels release proteins for shorter time periods. When encapsulated compound remain in the body for a long time, they may denature or aggregate as a result of exposure to moisture at 37° C., resulting in a loss of biological activity and possible changes in their structure. Rational strategies can be devised for stabilization depending on the mechanism of action involved. For example, if the aggregation mechanism is discovered to be intermolecular S—S bond formation through thio-disulfide interchange, stabilization may be achieved by modifying sulfhydryl residues, lyophilizing from acidic solutions, controlling moisture content, using appropriate additives, and developing specific polymer matrix compositions.

[0096] Dosage forms or compositions containing active ingredient in the range of 0.005% to 100% with the balance made up from non-toxic carrier may be prepared. Such compositions include solutions, suspensions, powders and sustained release formulations, such as, but not limited to, implants and microencapsulated delivery systems, and biodegradable, biocompatible polymers, such as collagen, ethylene vinyl acetate, polyanhydrides, polyglycolic acid, polyorthoesters, polylactic acid and others. Methods for preparation of these compositions are known to those skilled in the art. The contemplated compositions may contain about 0.001% 100% active ingredient, in certain embodiments, about 0.1 85% or about 75-95%.

[0097] The active ASOs or pharmaceutically acceptable salts may be prepared with carriers that protect the compound against rapid elimination from the body, such as time release formulations or coatings.

[0098] The compositions may include other active ASOs to obtain desired combinations of properties. The ASOs provided herein, or pharmaceutically acceptable salts thereof as described herein, may also be advantageously administered for therapeutic or prophylactic purposes together with another pharmacological agent known in the general art to be of value in treating one or more of the diseases or medical conditions referred to hereinabove, such as diseases related to oxidative stress. It is to be understood that such combination therapy constitutes a further aspect of the compositions and methods of treatment provided herein.

### A. Injectables, Solutions and Emulsions

[0099] Parenteral administration, generally characterized by injection, either subcutaneously, intramuscularly or intravenously is also contemplated herein. Injectables can be prepared in conventional forms, either as liquid solutions or suspensions, solid forms suitable for solution or suspension in liquid prior to injection, or as emulsions. In some embodiments, the suspension is a suspension of microparticles or nanoparticles. In some embodiments, the emulsion is an emulsion of microparticles or nanoparticles. Suitable excipients are, for example, water, saline, dextrose, glycerol or ethanol. In addition, if desired, the pharmaceutical compositions to be administered may also contain minor amounts of non-toxic auxiliary substances such as wetting or emulsifying agents, pH buffering agents, stabilizers, solubility enhancers, and other such agents, such as for example, sodium acetate, sorbitan monolaurate, triethanolamine oleate and cyclodextrins. Implantation of a slow release or sustained release system, such that a constant level of dosage is maintained is also contemplated herein. Briefly, an ASO provided herein is dispersed in a solid inner matrix, e.g., polymethylmethacrylate, polybutylmethacrylate, plasticized or unplasticized polyvinylchloride, plasticized nylon, plasticized polyethyleneterephthalate, natural rubber, polyisoprene, polyisobutylene, polybutadiene, polyethylene, ethylene-vinylacetate copolymers, silicone rubbers, polydimethylsiloxanes, silicone carbonate copolymers, hydrophilic polymers such as hydrogels of esters of acrylic and methacrylic acid, collagen, cross-linked polyvinylalcohol and cross-linked partially hydrolyzed polyvinyl acetate, that is surrounded by an outer polymeric membrane, e.g., polyethylene, polypropylene, ethylene/propylene copolymers, ethylene/ethyl acrylate copolymers, ethylene/vinylacetate copolymers, silicone rubbers, polydimethyl siloxanes, neoprene rubber, chlorinated polyethylene, polyvinylchloride, vinylchloride copolymers with vinyl acetate, vinylidene chloride, ethylene and propylene, ionomer polyethylene terephthalate, butyl rubber epichlorohydrin rubbers, ethylene/vinyl alcohol copolymer, ethylene/vinyl acetate/vinyl alcohol terpolymer, and ethylene/vinyloxyethanol copolymer, that is insoluble in body fluids. The ASO diffuses through the outer polymeric membrane in a release rate controlling step. The percentage of active ASO contained in such parenteral compositions is highly dependent on the specific nature thereof, as well as the activity of the compound and the needs of the subject.

[0100] Parenteral administration of the compositions includes intravenous, subcutaneous and intramuscular administrations. Preparations for parenteral administration include sterile solutions ready for injection, sterile dry soluble products, such as lyophilized powders, ready to be combined with a solvent just prior to use, including hypodermic tablets, sterile suspensions ready for injection, sterile dry insoluble products ready to be combined with a vehicle just prior to use and sterile emulsions. The solutions may be either aqueous or nonaqueous.

[0101] If administered intravenously, suitable carriers include physiological saline or phosphate buffered saline (PBS), and solutions containing thickening and solubilizing agents, such as glucose, polyethylene glycol, and polypropylene glycol and mixtures thereof.

[0102] Pharmaceutically acceptable carriers used in parenteral preparations include aqueous vehicles, nonaqueous vehicles, antimicrobial agents, isotonic agents, buffers, antioxidants, local anesthetics, suspending and dispersing agents, emulsifying agents, sequestering or chelating agents and other pharmaceutically acceptable substances.

[0103] Examples of aqueous vehicles include Sodium Chloride Injection, Ringers Injection, Isotonic Dextrose Injection, Sterile Water Injection, Dextrose and Lactated Ringers Injection. Nonaqueous parenteral vehicles include fixed oils of vegetable origin, cottonseed oil, corn oil, sesame oil and peanut oil. Antimicrobial agents in bacteriostatic or fungistatic concentrations must be added to parenteral preparations packaged in multiple dose containers which include phenols or cresols, mercurials, benzyl alcohol, chlorobutanol, methyl and propyl p hydroxybenzoic acid esters, thimerosal, benzalkonium chloride and benzethonium chloride. Isotonic agents include sodium chloride and dextrose. Buffers include phosphate and citrate. Antioxidants include sodium bisulfate. Local anesthetics include procaine hydrochloride. Suspending and dispersing agents include sodium carboxymethylcelluose, hydroxypropyl methylcellulose and polyvinylpyrrolidone. Emulsifying agents include Polysorbate 80 (TWEEN® 80). A sequestering or chelating agent of metal ions include EDTA. Pharmaceutical carriers also include ethyl alcohol, polyethylene glycol and propylene glycol for water miscible vehicles and sodium hydroxide, hydrochloric acid, citric acid or lactic acid for pH adjustment.

[0104] The concentration of the pharmaceutically active ASO is adjusted so that an injection provides an effective amount to produce the desired pharmacological effect. The exact dose depends on the age, weight and condition of the subject or animal as is known in the art.

[0105] The unit dose parenteral preparations are packaged in an ampule, a vial or a syringe with a needle. All preparations for parenteral administration must be sterile, as is known and practiced in the art.

[0106] Illustratively, intravenous or intraarterial infusion of a sterile aqueous solution containing an active ASO is an effective mode of administration. Another embodiment is a sterile aqueous or oily solution or suspension containing an active ASO injected as necessary to produce the desired pharmacological effect.

[0107] Injectables are designed for local and systemic administration. Typically, a therapeutically effective dosage is formulated to contain a concentration of at least about 0.1% w/w up to about 90% w/w or more, such as more than 1% w/w of the active ASO to the treated tissue(s). The active ASO may be administered at once or may be divided into a number of smaller doses to be administered at intervals of time. It is understood that the precise dosage and duration of treatment is a function of the tissue being treated and may be determined empirically using known testing protocols or by extrapolation from in vivo or in vitro test data. It is to be noted that concentrations and dosage values may also vary with the age of the individual treated. It is to be further understood that for any particular subject, specific dosage regimens should be adjusted over time according to the individual need and the professional judgment of the person administering or supervising the administration of the formulations, and that the concentration ranges set forth herein are exemplary only and are not intended to limit the scope or practice of the claimed formulations.

[0108] The ASO may be suspended in micronized or other suitable form or may be derivatized to produce a more soluble active product or to produce a prodrug. The form of the resulting mixture depends upon a number of factors, including the intended mode of administration and the solubility of the compound in the selected carrier or vehicle. The effective concentration is sufficient for ameliorating the symptoms of the condition and may be empirically determined.

### B. Lyophilized Powders

[0109] Also provided herein are lyophilized powders, which can be reconstituted for administration as solutions, emulsions and other mixtures. They may also be reconstituted and formulated as solids or gels.

[0110] The sterile, lyophilized powder is prepared by dissolving an ASO provided herein, or a pharmaceutically acceptable salt thereof, in a suitable solvent. The solvent may contain an excipient which improves the stability or other pharmacological component of the powder or reconstituted solution, prepared from the powder. Excipients that may be used include, but are not limited to, dextrose, sorbitol, fructose, corn syrup, xylitol, glycerin, glucose, sucrose or other suitable agent. The solvent may also contain a buffer, such as citrate, sodium or potassium phosphate or other such buffer known to those of skill in the art at, in one embodiment, about neutral pH. Subsequent sterile filtration of the solution followed by lyophilization under standard conditions known to those of skill in the art provides the desired formulation. Generally, the resulting solution will be apportioned into vials for lyophilization. Each vial will contain a single dosage (including but not limited to 10-1000 mg or 100-500 mg) or multiple dosages of the compound. The lyophilized powder can be stored under appropriate conditions, such as at about 4° C. to room temperature.

[0111] Reconstitution of this lyophilized powder with water for injection provides a formulation for use in parenteral administration. For reconstitution, about 1-50 mg, about 5-35 mg, or about 9-30 mg of lyophilized powder, is added per mL of sterile water or other suitable carrier. The precise amount depends upon the selected compound. Such amount can be empirically determined.

### C. Topical Administration

[0112] Topical mixtures are prepared as described for the local and systemic administration. The resulting mixture may be a solution, suspension, emulsion or the like and are formulated as creams, gels, ointments, emulsions, solutions, elixirs, lotions, suspensions, tinctures, pastes, foams, aerosols, irrigations, sprays, suppositories, bandages, dermal patches or any other formulations suitable for topical administration.

[0113] The compounds may be formulated for local or topical application, such as for topical application to the skin and mucous membranes, such as in the eye, in the form of gels, creams, and lotions and for application to the eye or for intracisternal or intraspinal application. Topical administration is contemplated for transdermal delivery and also for administration to the eyes or mucosa, or for inhalation therapies. Nasal solutions of the active compound alone or in combination with other pharmaceutically acceptable excipients can also be administered.

[0114] These solutions, particularly those intended for ophthalmic use, may be formulated as 0.01%-10% isotonic solutions, pH about 5-7, with appropriate salts.

### D. Sustained Release Compositions

[0115] ASOs provided herein can be administered by controlled release means or by delivery devices that are well known to those of ordinary skill in the art. Examples include, but are not limited to, those described in U.S. Pat. Nos. 3,845,770; 3,916,899; 3,536,809; 3,598,123; and 4,008,719, 5,674,533, 5,059,595, 5,591,767, 5,120,548, 5,073,543, 5,639,476, 5,354,556, 5,639,480, 5,733,566, 5,739,108, 5,891,474, 5,922,356, 5,972,891, 5,980,945, 5,993,855, 6,045,830, 6,087,324, 6,113,943, 6,197,350, 6,248,363, 6,264,970, 6,267,981, 6,376,461, 6,419,961, 6,589,548, 6,613,358, 6,699,500 and 6,740,634, each of which is incorporated herein by reference. Such dosage forms can be used to provide slow or controlled-release of one or more active ingredients using, for example, hydroxypropylmethyl cellulose, other polymer matrices, gels, permeable membranes, osmotic systems, multilayer coatings, microparticles, liposomes, microspheres, or a combination thereof to provide the desired release profile in varying proportions. Suitable controlled-release formulations known to those of ordinary skill in the art, including those described herein, can be readily selected for use with the active ingredients provided herein.

[0116] All controlled-release pharmaceutical products have a common goal of improving drug therapy over that achieved by their non-controlled counterparts. In one embodiment, the use of an optimally designed controlled-release preparation in medical treatment is characterized by a minimum of drug substance being employed to cure or control the condition in a minimum amount of time. In certain embodiments, advantages of controlled-release formulations include extended activity of the drug, reduced dosage frequency, and increased subject compliance. In addition, controlled-release formulations can be used to affect the time of onset of action or other characteristics, such as blood levels of the drug, and can thus affect the occurrence of side (e.g., adverse) effects.

[0117] Most controlled-release formulations are designed to initially release an amount of drug (active ingredient) that promptly produces the desired therapeutic effect, and gradually and continually release of other amounts of drug to maintain this level of therapeutic or prophylactic effect over an extended period of time. In order to maintain this constant level of drug in the body, the drug must be released from the dosage form at a rate that will replace the amount of drug being metabolized and excreted from the body. Controlled release of an ASO can be stimulated by various conditions including, but not limited to, pH, temperature, enzymes, water, or other physiological conditions or compounds.

[0118] In certain embodiments, the ASO may be administered using intravenous infusion, an implantable osmotic pump, a transdermal patch, liposomes, or other modes of administration. In one embodiment, a pump may be used (see, Sefton, CRC Crit. Ref. Biomed. Eng. 14:201 (1987); Buchwald et al., Surgery 88:507 (1980); Saudek et al., N. Engl. J. Med. 321:574 (1989). In another embodiment, polymeric materials can be used. In yet another embodiment, a controlled release system can be placed in proximity of the therapeutic target, i.e., thus requiring only a fraction of the systemic dose (see, e.g., Goodson, Medical Applications of Controlled Release, vol. 2, pp. 115-138 (1984).

[0119] Other controlled release systems are discussed in the review by Langer (Science 249:1527-1533 (1990). The ASO can be dispersed in a solid inner matrix, e.g., polymethylmethacrylate, polybutylmethacrylate, plasticized or unplasticized polyvinylchloride, plasticized nylon, plasticized polyethyleneterephthalate, natural rubber, polyisoprene, polyisobutylene, polybutadiene, polyethylene, ethylene-vinylacetate copolymers, silicone rubbers, polydimethylsiloxanes, silicone carbonate copolymers, hydrophilic polymers such as hydrogels of esters of acrylic and methacrylic acid, collagen, cross-linked polyvinylalcohol and cross-linked partially hydrolyzed polyvinyl acetate, that is surrounded by an outer polymeric membrane, e.g., polyethylene, polypropylene, ethylene/propylene copolymers, ethylene/ethyl acrylate copolymers, ethylene/vinylacetate copolymers, silicone rubbers, polydimethyl siloxanes, neoprene rubber, chlorinated polyethylene, polyvinylchloride, vinylchloride copolymers with vinyl acetate, vinylidene chloride, ethylene and propylene, ionomer polyethylene terephthalate, butyl rubber epichlorohydrin rubbers, ethylene/vinyl alcohol copolymer, ethylene/vinyl acetate/vinyl alcohol terpolymer, and ethylene/vinyloxyethanol copolymer, that is insoluble in body fluids. The ASO then diffuses through the outer polymeric membrane in a release rate controlling step. The percentage of active ingredient contained in such parenteral compositions is highly dependent on the specific nature thereof, as well as the needs of the subject.

### E. Targeted Formulations

[0120] The ASOs provided herein, or pharmaceutically acceptable salts thereof, may also be formulated to be targeted to a particular tissue, receptor, or other area of the body of the subject to be treated, including liposome-, resealed erythrocyte-, and antibody-based delivery systems. Many such targeting methods are well known to those of skill in the art. All such targeting methods are contemplated herein for use in the instant compositions. For non-limiting examples of targeting methods, see, e.g., U.S. Pat. Nos. 6,316,652, 6,274,552, 6,271,359, 6,253,872, 6,139,865, 6,131,570, 6,120,751, 6,071,495, 6,060,082, 6,048,736, 6,039,975, 6,004,534, 5,985,307, 5,972,366, 5,900,252, 5,840,674, 5,759,542 and 5,709,874.

[0121] In one embodiment, the antibody-based delivery system is an antibody-drug conjugate (“ADC”), e.g., as described in Hamilton G S, Biologicals, 2015 September, 43 (5): 318-32; Kim E G and Kim K M, Biomol. Ther. (Seoul), 2015 Nov. 23 (6): 493-509; and Peters C and Brown S, Biosci. Rep., 2015 Jun. 12, 35 (4) pii: c00225, each of which is incorporated herein by reference.

[0122] In one embodiment, liposomal suspensions, including tissue-targeted liposomes, such as tumor-targeted liposomes, may also be suitable as pharmaceutically acceptable carriers. These may be prepared according to methods known to those skilled in the art. For example, liposome formulations may be prepared as described in U.S. Pat. No. 4,522,811. Briefly, liposomes such as multilamellar vesicles (MLV's) may be formed by drying down egg phosphatidyl choline and brain phosphatidyl serine (7:3 molar ratio) on the inside of a flask. A solution of an ASO provided herein in phosphate buffered saline lacking divalent cations (PBS) is added and the flask shaken until the lipid film is dispersed. The resulting vesicles are washed to remove unencapsulated compound, pelleted by centrifugation, and then resuspended in PBS.

### F. Articles of Manufacture

[0123] The ASOs or pharmaceutically acceptable salts can be packaged as articles of manufacture containing packaging material, an ASO or pharmaceutically acceptable salt thereof provided herein, which is used for treatment, prevention or amelioration of one or more symptoms or progression of a disease or disorder disclosed herein, and a label that indicates that the compound or pharmaceutically acceptable salt thereof is used for treatment, prevention or amelioration of one or more symptoms or progression of a disease or disorder disclosed herein.

[0124] The articles of manufacture provided herein contain packaging materials. Packaging materials for use in packaging pharmaceutical products are well known to those of skill in the art. Sec, e.g., U.S. Pat. Nos. 5,323,907, 5,052,558 and 5,033,252. Examples of pharmaceutical packaging materials include, but are not limited to, blister packs, bottles, tubes, inhalers, pumps, bags, vials, containers, syringes, pens, bottles, and any packaging material suitable for a selected formulation and intended mode of administration and treatment. A wide array of formulations of the ASOs and compositions provided herein are contemplated.

[0125] In certain embodiments, provided herein also are kits which, when used by the medical practitioner, can simplify the administration of appropriate amounts of ASOs to a subject. In certain embodiments, the kit provided herein includes a container and a dosage form of an ASO provided herein or a pharmaceutically acceptable salt, solvate, or prodrug thereof.

[0126] In certain embodiments, the kit includes a container comprising a dosage form of the ASO provided herein or a pharmaceutically acceptable salt, solvate, or prodrug thereof, in a container comprising one or more other therapeutic agent(s) described herein.

[0127] Kits provided herein can further include devices that are used to administer the ASOs. Examples of such devices include, but are not limited to, syringes, needle-less injectors drip bags, patches, and inhalers.

[0128] Kits provided herein can further include pharmaceutically acceptable vehicles that can be used to administer one or more active ingredients. For example, if an active ingredient is provided in a solid form that must be reconstituted for parenteral administration, the kit can comprise a sealed container of a suitable vehicle in which the active ingredient can be dissolved to form a particulate-free sterile solution that is suitable for parenteral administration. Examples of pharmaceutically acceptable vehicles include, but are not limited to: aqueous vehicles, including, but not limited to, Water for Injection USP, Sodium Chloride Injection, Ringer's Injection, Dextrose Injection, Dextrose and Sodium Chloride Injection, and Lactated Ringer's Injection; water-miscible vehicles, including, but not limited to, ethyl alcohol, polyethylene glycol, and polypropylene glycol; and non-aqueous vehicles, including, but not limited to, corn oil, cottonseed oil, peanut oil, sesame oil, ethyl oleate, isopropyl myristate, and benzyl benzoate.

### IV. Dosing

[0129] The ASOs and pharmaceutical compositions provided herein may be dosed in certain therapeutically or prophylactically effective amounts, certain time intervals, certain dosage forms, and certain dosage administration methods as described below.

[0130] In certain embodiments, a therapeutically or prophylactically effective amount of the ASO is from about 0.005 to about 1,000 mg per day, from about 0.01 to about 500 mg per day, from about 0.01 to about 250 mg per day, from about 0.01 to about 100 mg per day, from about 0.1 to about 100 mg per day, from about 0.5 to about 100 mg per day, from about 1 to about 100 mg per day, from about 0.01 to about 50 mg per day, from about 0.1 to about 50 mg per day, from about 0.5 to about 50 mg per day, from about 1 to about 50 mg per day, from about 0.02 to about 25 mg per day, from about 0.05 to about 10 mg per day, from about 0.05 to about 5 mg per day, from about 0.1 to about 5 mg per day, or from about 0.5 to about 5 mg per day.

[0131] In certain embodiments, the therapeutically or prophylactically effective amount is about 0.1, about 0.2, about 0.5, about 1, about 2, about 3, about 4, about 5, about 6, about 7, about 8, about 9, about 10, about 15, about 20, about 25, about 30, about 40, about 45, about 50, about 60, about 70, about 80, about 90, about 100, or about 150 mg per day.

[0132] In one embodiment, the recommended daily dose range of the ASO provided herein, or a derivative thereof, for the conditions described herein lie within the range of from about 0.5 mg to about 50 mg per day, in one embodiment given as a single once-a-day dose, or in divided doses throughout a day. In some embodiments, the dosage ranges from about 1 mg to about 50 mg per day. In other embodiments, the dosage ranges from about 0.5 to about 5 mg per day. Specific doses per day include 0.1, 0.2, 0.5, 1, 2, 3, 4, 5, 6, 7, 8, 9, 10, 11, 12, 13, 14, 15, 16, 17, 18, 19, 20, 21, 22, 23, 24, 25, 26, 27, 28, 29, 30, 31, 32, 33, 34, 35, 36, 37, 38, 39, 40, 41, 42, 43, 44, 45, 46, 47, 48, 49 or 50 mg per day.

[0133] In a specific embodiment, the recommended starting dosage may be 0.5, 1, 2, 3, 4, 5, 10, 15, 20, 25 or 50 mg per day. In another embodiment, the recommended starting dosage may be 0.5, 1, 2, 3, 4, or 5 mg per day. The dose may be escalated to 15, 20, 25, 30, 35, 40, 45 and 50 mg/day. In a specific embodiment, the ASO can be administered in an amount of about 25 mg/day. In a particular embodiment, the ASO can be administered in an amount of about 10 mg/day. In a particular embodiment, the ASO can be administered in an amount of about 5 mg/day. In a particular embodiment, the ASO can be administered in an amount of about 4 mg/day. In a particular embodiment, the ASO can be administered in an amount of about 3 mg/day.

[0134] In certain embodiments, the therapeutically or prophylactically effective amount is from about 0.001 to about 100 mg/kg/day, from about 0.01 to about 50 mg/kg/day, from about 0.01 to about 25 mg/kg/day, from about 0.01 to about 10 mg/kg/day, from about 0.01 to about 9 mg/kg/day, 0.01 to about 8 mg/kg/day, from about 0.01 to about 7 mg/kg/day, from about 0.01 to about 6 mg/kg/day, from about 0.01 to about 5 mg/kg/day, from about 0.01 to about 4 mg/kg/day, from about 0.01 to about 3 mg/kg/day, from about 0.01 to about 2 mg/kg/day, from about 0.01 to about 1 mg/kg/day, or from about 0.01 to about 0.05 mg/kg/day.

[0135] The administered dose can also be expressed in units other than mg/kg/day. For example, doses for parenteral administration can be expressed as mg/m²/day. One of ordinary skill in the art would readily know how to convert doses from mg/kg/day to mg/m²/day to given either the height or weight of a subject or both (see, www.fda.gov/cder/cancer/animalframe.htm). For example, a dose of 1 mg/kg/day for a 65 kg human is approximately equal to 38 mg/m²/day.

[0136] In certain embodiments, the amount of the ASO administered is sufficient to provide a plasma concentration of the compound at steady state, ranging from about 0.001 to about 500 μM, about 0.002 to about 200 μM, about 0.005 to about 100 μM, about 0.01 to about 50 μM, from about 1 to about 50 μM, about 0.02 to about 25 μM, from about 0.05 to about 20 μM, from about 0.1 to about 20 μM, from about 0.5 to about 20 μM, or from about 1 to about 20 μM.

[0137] In other embodiments, the amount of the ASO administered is sufficient to provide a plasma concentration of the compound at steady state, ranging from about 5 to about 100 nM, about 5 to about 50 nM, about 10 to about 100 nM, about 10 to about 50 nM or from about 50 to about 100 nM.

[0138] As used herein, the term “plasma concentration at steady state” is the concentration reached after a period of administration of a compound provided herein, or a derivative thereof. Once steady state is reached, there are minor peaks and troughs on the time dependent curve of the plasma concentration of the compound.

[0139] In certain embodiments, the amount of the ASO administered is sufficient to provide a maximum plasma concentration (peak concentration) of the compound, ranging from about 0.001 to about 50 μM, about 0.002 to about 200 M, about 0.005 to about 100 μM, about 0.01 to about 50 μM, from about 1 to about 50 μM, about 0.02 to about 25 μM, from about 0.05 to about 20 μM, from about 0.1 to about 20 M, from about 0.5 to about 20 μM, or from about 1 to about 20 μM.

[0140] In certain embodiments, the amount of the ASO administered is sufficient to provide a minimum plasma concentration (trough concentration) of the compound, ranging from about 0.001 to about 500 μM, about 0.002 to about 200 μM, about 0.005 to about 100 μM, about 0.01 to about 50 μM, from about 1 to about 50 M, about 0.01 to about 25 μM, from about 0.01 to about 20 μM, from about 0.02 to about 20 μM, from about 0.02 to about 20 μM, or from about 0.01 to about 20 μM.

[0141] In certain embodiments, the amount of the ASO administered is sufficient to provide an area under the curve (AUC) of the compound, ranging from about 100 to about 100,000 ng*hr/mL, from about 1,000 to about 50,000 ng*hr/mL, from about 5,000 to about 25,000 ng*hr/mL, or from about 5,000 to about 10,000 ng*hr/mL.

[0142] The methods provided herein encompass treating a patient regardless of subject's age, although some diseases or disorders are more common in certain age groups.

[0143] Depending on the disease to be treated and the subject's condition, the ASO provided herein, or a derivative thereof, may be administered by parenteral (e.g., intramuscular, intraperitoneal, intravenous, CIV, intracisternal injection or infusion, subcutaneous injection, or implant), or topical (e.g., transdermal or local) routes of administration. The ASO provided herein, or a derivative thereof, may be formulated, alone or together, in suitable dosage unit with pharmaceutically acceptable excipients, carriers, adjuvants and vehicles, appropriate for each route of administration.

[0144] In another embodiment, the ASO provided herein, or a derivative thereof, is administered parenterally. In yet another embodiment, the ASO provided herein, or a derivative thereof, is administered intravenously.

[0145] The ASO provided herein, or a derivative thereof, can be delivered as a single dose such as, e.g., a single bolus injection, or over time, such as, e.g., continuous infusion over time or divided bolus doses over time. The ASO can be administered repeatedly if necessary, for example, until the subject experiences stable disease or regression, or until the subject experiences disease progression or unacceptable toxicity.

[0146] The ASO provided herein, or a derivative thereof, can be administered once daily (QD), or divided into multiple daily doses such as twice daily (BID), three times daily (TID), and four times daily (QID). In addition, the administration can be continuous (i.e., daily for consecutive days or every day), intermittent, e.g., in cycles (i.e., including days, weeks, or months of rest without drug). As used herein, the term “daily” is intended to mean that a therapeutic compound, such as the compound provided herein, or a derivative thereof, is administered once or more than once each day, for example, for a period of time. The term “continuous” is intended to mean that a therapeutic compound, such as the compound provided herein or a derivative thereof, is administered daily for an uninterrupted period of at least 10 days to 52 weeks. The term “intermittent” or “intermittently” as used herein is intended to mean stopping and starting at either regular or irregular intervals. For example, intermittent administration of the ASO provided herein or a derivative thereof is administration for one to six days per week, administration in cycles (e.g., daily administration for two to eight consecutive weeks, then a rest period with no administration for up to one week), or administration on alternate days. The term “cycling” as used herein is intended to mean that a therapeutic compound, such as the compound provided herein or a derivative thereof, is administered daily or continuously but with a rest period. In some such embodiments, administration is once a day for two to six days, then a rest period with no administration for five to seven days.

[0147] In some embodiments, the frequency of administration is in the range of about a daily dose to about a monthly dose. In certain embodiments, administration is once a day, twice a day, three times a day, four times a day, once every other day, twice a week, once every week, once every two weeks, once every three weeks, or once every four weeks. In one embodiment, the compound provided herein, or a derivative thereof, is administered once a day. In another embodiment, the ASO provided herein, or a derivative thereof, is administered twice a day. In yet another embodiment, the ASO provided herein, or a derivative thereof, is administered three times a day. In still another embodiment, the ASO provided herein, or a derivative thereof, is administered four times a day.

[0148] In certain embodiments, the ASO provided herein, or a derivative thereof, is administered once per day from one day to six months, from one week to three months, from one week to four weeks, from one week to three weeks, or from one week to two weeks. In certain embodiments, the ASO provided herein, or a derivative thereof, is administered once per day for one week, two weeks, three weeks, or four weeks. In one embodiment, the ASO provided herein, or a derivative thereof, is administered once per day for 4 days. In one embodiment, the ASO provided herein, or a derivative thereof, is administered once per day for 5 days. In one embodiment, the ASO provided herein, or a derivative thereof, is administered once per day for 6 days. In one embodiment, the ASO provided herein, or a derivative thereof, is administered once per day for one week. In another embodiment, the ASO provided herein, or a derivative thereof, is administered once per day for two weeks. In yet another embodiment, the ASO provided herein, or a derivative thereof, is administered once per day for three weeks. In still another embodiment, the ASO provided herein, or a derivative thereof, is administered once per day for four weeks.

### V. Methods of Treatment

[0149] In another embodiment, a method of treating a subject with Duchenne muscular dystrophy (DMD) is provided. In one embodiment, the method involves the step of administering to the subject an ASO or composition provided herein. In another embodiment, a method of delaying the onset of DMD by administering an ASO or composition provided herein is provided. In another embodiment, the methods alleviate one or more symptom(s) of DMD.

[0150] Alleviating one or more symptom(s) of DMD in an individual using an ASO provided herein may be assessed by any of the following assays: prolongation of time to loss of walking, improvement of muscle strength, improvement of the ability to lift weight, improvement of the time taken to rise from the floor, improvement in the nine-meter walking time, improvement in the time taken for four-stairs climbing, improvement of the leg function grade, improvement of the pulmonary function, improvement of cardiac function, improvement of the quality of life. Each of these assays is known to the skilled person. For each of these assays, as soon as a detectable improvement or prolongation of a parameter measured in an assay has been found, it will preferably mean that one or more symptoms of DMD has been alleviated in an individual using an ASO provided herein. Detectable improvement or prolongation is in one embodiment a statistically significant improvement or prolongation as described in Hodgetts et al. Neuromuscular Disorders 2006; 16:591-602. Alternatively, the alleviation of one or more symptom(s) of DMD may be assessed by measuring an improvement of a muscle fiber function, integrity and/or survival. In another embodiment, one or more symptom(s) of a DMD patient is/are alleviated and/or one or more characteristic(s) of one or more muscle cells from a DMD patient is/are improved. Such symptoms or characteristics may be assessed at the cellular, tissue level or on the patient self.

[0151] An alleviation of one or more characteristics of a muscle cell from a patient may be assessed by any of the following assays on a myogenic cell or muscle cell from a patient: reduced calcium uptake by muscle cells, decreased collagen synthesis, altered morphology, altered lipid biosynthesis, decreased oxidative stress, and/or improved muscle fiber function, integrity, and/or survival. These parameters are usually assessed using immunofluorescence and/or histochemical analyses of cross sections of muscle biopsies.

[0152] The improvement of muscle fiber function, integrity and/or survival may be assessed using at least one of the following assays: a detectable decrease of creatine kinase in blood, a detectable decrease of necrosis of muscle fibers in a biopsy cross-section of a muscle suspected to be dystrophic, and/or a detectable increase of the homogeneity of the diameter of muscle fibers in a biopsy cross-section of a muscle suspected to be dystrophic. Each of these assays is known to the skilled person.

[0153] Creatine kinase may be detected in blood as described in Hodgetts et al. (2006). A detectable decrease in creatine kinase may mean a decrease of 5%, 10%, 20%, 30%, 40%, 50%, 60%, 70%, 80%, 90% or more compared to the concentration of creatine kinase in a same DMD patient before treatment.

[0154] A detectable decrease of necrosis of muscle fibers is preferably assessed in a muscle biopsy, more preferably as described in Hodgetts et al. (2006), using biopsy cross-sections. A detectable decrease of necrosis may be a decrease of 5%, 10%, 20%, 30%, 40%, 50%, 60%, 70%, 80%, 90% or more of the area wherein necrosis has been identified using biopsy cross-sections. The decrease is measured by comparison to the necrosis as assessed in a same DMD patient before treatment.

[0155] A detectable increase of the homogeneity of the diameter of a muscle fiber is preferably assessed in a muscle biopsy cross-section, more preferably as described in Hodgetts et al. (supra). The increase is measured by comparison to the homogeneity of the diameter of a muscle fiber in a same DMD patient before treatment.

[0156] In one embodiment, an ASO provided herein provides said individual with a functional or a semi-functional dystrophin protein, and is able to, for at least in part decrease the production of an aberrant dystrophin protein in said individual.

[0157] In one embodiment, providing an individual with a functional or a semi-functional dystrophin protein means an increase in the production of functional or semi-functional dystrophin protein. Increasing the production of functional or semi-functional dystrophin mRNA, or functional or semi-functional dystrophin protein, means a detectable increase or at least 5%, 10%, 20%, 30%, 40%, 50%, 60%, 70%, 80%, 90%, 100%, 120%, 140%, 160%, 180%, 200% or more compared to the initial amount of functional or semi-functional mRNA, or functional or semi-functional dystrophin protein, as detectable by RT-digital droplet PCR (mRNA) (Verheul et al., PLOS ONE 2016, 11 (9): e0162467) or immunofluorescence (Beckman et al., PLOS ONE 2014; 9 (9):e107494), western blot, or capillary Western immunoassay (Beckman et al., PLOS ONE 2018; 13 (4):e0195850) analysis (protein). In another embodiment, said initial amount is the amount of functional or semifunctional mRNA, or functional or semi-functional dystrophin protein, at the onset of inducing exon-skipping in the dystrophin pre-mRNA in a cell, in an organ, in a tissue and/or in an individual using a compound of the invention.

[0158] Decreasing the production of an aberrant dystrophin mRNA, or aberrant dystrophin protein, means that 90%, 80%, 70%, 60%, 50%, 40%, 30%, 20%, 10%, 5% or less of the initial amount of aberrant dystrophin mRNA, or aberrant dystrophin protein, is still detectable by RT-digital droplet PCR (mRNA) or immunofluorescence, western blot, or capillary Western immunoassay (Wes) analysis (protein). In one embodiment, said initial amount is the amount of aberrant dystrophin mRNA, or aberrant dystrophin protein, at the onset of inducing exon-skipping in the dystrophin pre-mRNA in a cell, in an organ, in a tissue and/or in an individual using an ASO of the invention. An aberrant dystrophin mRNA or protein is also referred to herein as a less functional (compared to a wild type functional dystrophin protein) or a non-functional dystrophin mRNA or protein. A non-functional dystrophin protein is a dystrophin protein which is not able to bind actin and/or members of the DGC protein complex. A non-functional dystrophin protein or dystrophin mRNA docs typically not have or does not encode a dystrophin protein with an intact C-terminus of the protein. The detection of a functional or semi-functional dystrophin mRNA or protein may be done as for an aberrant dystrophin mRNA or protein.

[0159] Once a DMD patient is provided with a functional or a semi-functional dystrophin protein, at least part of the cause of DMD is taken away. Hence, it would then be expected that the symptoms of DMD are at least partly alleviated, or that the rate with which the symptoms worsen is decreased, resulting in a slower decline. The enhanced skipping frequency also increases the level of functional or a semi-functional dystrophin protein produced in a muscle cell of a DMD individual.

### VI. Combination Therapy with a Second Active Agent

[0160] The ASO provided herein, or a derivative thereof, can also be combined or used in combination with other therapeutic agents useful in the treatment and/or prevention of DMD.

[0161] In one embodiment, provided herein is a method of treating, preventing, or managing DMD, comprising administering to a subject an ASO provided herein, or a derivative thereof, in combination with one or more second active agents.

[0162] As used herein, the term “in combination” includes the use of more than one therapy (e.g., one or more prophylactic and/or therapeutic agents). However, the use of the term “in combination” does not restrict the order in which therapies (e.g., prophylactic and/or therapeutic agents) are administered to a subject with a disease or disorder. A first therapy (e.g., a prophylactic or therapeutic agent such as an ASO provided herein) can be administered prior to (e.g., 5 minutes, 15 minutes, 30 minutes, 45 minutes, 1 hour, 2 hours, 4 hours, 6 hours, 12 hours, 24 hours, 48 hours, 72 hours, 96 hours, 1 week, 2 weeks, 3 weeks, 4 weeks, 5 weeks, 6 weeks, 8 weeks, or 12 weeks before), concomitantly with, or subsequent to (e.g., 5 minutes, 15 minutes, 30 minutes, 45 minutes, 1 hour, 2 hours, 4 hours, 6 hours, 12 hours, 24 hours, 48 hours, 72 hours, 96 hours, 1 week, 2 weeks, 3 weeks, 4 weeks, 5 weeks, 6 weeks, 8 weeks, or 12 weeks after) the administration of a second therapy (e.g., a prophylactic or therapeutic agent) to the subject. Triple therapy is also contemplated herein.

[0163] Administration of the ASO provided herein, or a derivative thereof and one or more second active agents to a subject can occur simultaneously or sequentially by the same or different routes of administration. The suitability of a particular route of administration employed for a particular active agent will depend on the active agent itself (e.g., whether it can be administered orally without decomposing prior to entering the blood stream) and the disease or disorder being treated.

[0164] The route of administration of the ASO provided herein, or a derivative thereof, is independent of the route of administration of a second therapy. In another embodiment, the ASO provided herein, or a derivative thereof, is administered intravenously. Thus, in accordance with these embodiments, the ASO provided herein, or a derivative thereof, is administered intravenously, and the second therapy can be administered orally, parenterally, intraperitoneally, intravenously, intraarterially, transdermally, sublingually, intramuscularly, rectally, transbuccally, intranasally, liposomally, via inhalation, vaginally, intraocularly, via local delivery by catheter or stent, subcutaneously, intraadiposally, intraarticularly, intrathecally, or in a slow release dosage form. In one embodiment, the ASO provided herein, or a derivative thereof, and a second therapy are administered by the same mode of administration, e.g., by IV. In another embodiment, the ASO provided herein, or a derivative thereof, is administered by one mode of administration, e.g., by IV, whereas the second agent is administered by another mode of administration, e.g., orally.

[0165] In one embodiment, the second active agent is administered intravenously or subcutaneously and once or twice daily in an amount of from about 1 to about 1000 mg, from about 5 to about 500 mg, from about 10 to about 350 mg, or from about 50 to about 200 mg. The specific amount of the second active agent will depend on the specific agent used, the type of disease being treated or managed, the severity and stage of disease, and the amount of the ASO provided herein, or a derivative thereof, and any optional additional active agents concurrently administered to the subject.

[0166] One or more second active ingredients or agents can be used together with the ASO provided herein, or a derivative thereof, in the methods and compositions provided herein. Second active agents can be large molecules (e.g., proteins) or small molecules (e.g., synthetic inorganic, organometallic, or organic molecules).

[0167] Examples of large molecule active agents include, but are not limited to, hematopoietic growth factors, cytokines, ASOs and monoclonal and polyclonal antibodies. Typical large molecule active agents are biological molecules, such as naturally occurring or synthetic or recombinant proteins. Specific examples for use herein include eteplirsen, casimersen, golodirsen, viltolarsen and SRP-5051 (Sarepta Therapeutics).

[0168] Examples of small molecules include corticosteroids, such as deflazacort.

[0169] Other therapies that may be combined with the ASOs provided herein include gene therapy (e.g., SRP-9001, GALGT2 or GNT 0004 (Sarepta Therapeutics)), gene editing (e.g., CRISPR/CAS9 (Sarepta Therapeutics)) and cellular therapy (e.g., CAP-1002 (Capricor Therapeutics/Nippon Shinyaku Co. Ltd.)).

### VII. Examples

[0170] The examples below are meant to illustrate certain embodiments provided herein, and not to limit the scope of this disclosure.

### Example 1

[0171] A KM571 human immortalized myoblast line with an exon 52 deletion was used as a model system. The KM571 cells were previously immortalized using hTERT and CDK4 (PMID: 22040608). On day 1, 100,000 cells per well were nucleofected (Lonza, setting DS-150, SF solution) in the presence of 1.4 micromolar of the individual oligonucleotides, then diluted 10-fold with Skeletal Muscle growth medium (PromoCell (cat #: C-23060), final volume 12.5% HI—FBS and 100 units/mL Pen/Strep), and then transferred to a 96-well tissue culture plate. On day 4, the cells were harvested using TaqMan Gene Expression Cells-to-CT (Thermo Fisher Scientific, 55 microliter final lysis volume), 10 microliter of RNA was reverse transcribed, and then 4 microliters of the resulting cDNA were evaluated by qPCR (skip forward primer 5′-GGTGGGTGACCTTGAGGAT-3′ (SEQ ID NO: 1437), skip probe 5′-ATCATCAAGCAGAAGCAGTTGGCC-3′ (SEQ ID NO: 1438), and skip reverse primer 5′-GCCAAGTCATTTGCCACATCTA-3′ (SEQ ID NO: 1439)). A double-stranded DNA fragment of the skipped amplicon (IDT, exon 51 spliced to exon 54) was used to validate the assay and to quantify the number of copies in unknown samples (reported as Average copies e51-54 for SEQ ID NO: 332-391). The data shown is also shown as the fold change in exon 53 skipping relative to a positive control ASO (SEQ ID NO: 392-846).

### Results

| SEQ ID NO: | Average Copies e51-54 |
|---|---|
| 332 | 18.46044 |
| 333 | 28.57523 |
| 334 | 52.43133 |
| 335 | 33.74944 |
| 336 | 30.13969 |
| 337 | 23.89664 |
| 338 | 21.05017 |
| 339 | 43.50294 |
| 340 | 63.29167 |
| 341 | 110.6124 |
| 342 | 108.6631 |
| 343 | 48.1524 |
| 344 | 70.25501 |
| 345 | 60.53615 |
| 346 | 85.42719 |
| 347 | 159.6615 |
| 348 | 99.35136 |
| 349 | 124.601 |
| 350 | 55.85621 |
| 351 | 46.54202 |
| 352 | 50.65856 |
| 353 | 71.15927 |
| 354 | 79.19031 |
| 355 | 43.63413 |
| 356 | 48.61327 |
| 357 | 63.02238 |
| 358 | 89.28076 |
| 359 | 101.811 |
| 360 | 34.75905 |
| 361 | 75.3985 |
| 362 | 35.90505 |
| 363 | 29.72139 |
| 364 | 38.61757 |
| 365 | 29.21741 |
| 366 | 16.76273 |
| 367 | 33.81896 |
| 368 | 22.58539 |
| 369 | 34.77628 |
| 370 | 34.91955 |
| 371 | 62.08335 |
| 372 | 58.5308 |
| 373 | 42.37498 |
| 374 | 39.97476 |
| 375 | 33.90953 |
| 376 | 37.85591 |
| 377 | 33.0423 |
| 378 | 27.9666 |
| 379 | 43.00257 |
| 380 | 34.50121 |
| 381 | 79.92295 |
| 382 | 36.55703 |
| 383 | 38.47768 |
| 384 | 74.43272 |
| 385 | 34.42958 |
| 386 | 34.3297 |
| 387 | 23.03655 |
| 388 | 35.14468 |
| 389 | 36.06588 |
| 390 | 33.00826 |
| 391 | 33.46939 |

| SEQ ID NO: | Average fold change |
|---|---|
| 392 | 0.12789 |
| 393 | 0.13138 |
| 394 | 0.099902 |
| 395 | 0.181408 |
| 396 | 0.166265 |
| 397 | 0.099934 |
| 398 | 0.010325 |
| 399 | 0.039361 |
| 400 | 0.149986 |
| 401 | 0.631706 |
| 402 | 0.403679 |
| 403 | 0.1352 |
| 404 | 0.117861 |
| 405 | 0.0904 |
| 406 | 0.05062 |
| 407 | 0.139661 |
| 408 | 0.094497 |
| 409 | 0.040174 |
| 410 | 0.111435 |
| 411 | 0.26025 |
| 412 | 0.610883 |
| 413 | 1.012774 |
| 414 | 0.485686 |
| 415 | 0.28601 |
| 416 | 0.278988 |
| 417 | 0.320944 |
| 418 | 0.114375 |
| 419 | 0.163052 |
| 420 | 0.189847 |
| 421 | 0.294068 |
| 422 | 0.159571 |
| 423 | 0.236029 |
| 424 | 0.133519 |
| 425 | 0.166776 |
| 426 | 0.110905 |
| 427 | 0.120288 |
| 428 | 0.079664 |
| 429 | 0.048326 |
| 430 | 0.065412 |
| 431 | 0.114474 |
| 432 | 0.048914 |
| 433 | 0.090585 |
| 434 | 0.0664 |
| 435 | 0.03668 |
| 436 | 0.040513 |
| 437 | 0.042958 |
| 438 | 0.050075 |
| 439 | 0.059613 |
| 440 | 0.055411 |
| 441 | 0.092556 |
| 442 | 0.087263 |
| 443 | 0.189697 |
| 444 | 0.154739 |
| 445 | 0.116972 |
| 446 | 0.128381 |
| 447 | 0.298654 |
| 448 | 0.126215 |
| 449 | 0.285149 |
| 450 | 0.173892 |
| 451 | 0.374944 |
| 452 | 0.464187 |
| 453 | 0.599866 |
| 454 | 0.549928 |
| 455 | 1.628684 |
| 456 | 1.066097 |
| 457 | 1.282981 |
| 458 | 0.302204 |
| 459 | 0.356965 |
| 460 | 0.260187 |
| 461 | 0.489771 |
| 462 | 0.379749 |
| 463 | 0.505569 |
| 464 | 0.984469 |
| 465 | 0.671754 |
| 466 | 0.871486 |
| 467 | 0.353531 |
| 468 | 0.275883 |
| 469 | 0.43617 |
| 470 | 0.442532 |
| 471 | 0.346929 |
| 472 | 0.180567 |
| 473 | 0.204937 |
| 474 | 0.096495 |
| 475 | 0.160915 |
| 476 | 0.214371 |
| 477 | 0.178929 |
| 478 | 0.166159 |
| 479 | 0.252055 |
| 480 | 0.155495 |
| 481 | 0.162084 |
| 482 | 0.076661 |
| 483 | 0.072392 |
| 484 | 0.107182 |
| 485 | 0.143409 |
| 486 | 0.100518 |
| 487 | 0.140252 |
| 488 | 0.212131 |
| 489 | 0.193038 |
| 490 | 0.091341 |
| 491 | 0.162475 |
| 492 | 0.189492 |
| 493 | 0.124972 |
| 494 | 0.147759 |
| 495 | 0.067958 |
| 496 | 0.05222 |
| 497 | 0.041031 |
| 498 | 0.047479 |
| 499 | 0.055796 |
| 500 | 0.075652 |
| 501 | 0.150396 |
| 502 | 0.053813 |
| 503 | 0.06741 |
| 504 | 0.082688 |
| 505 | 0.063553 |
| 506 | 0.047319 |
| 507 | 0.062183 |
| 508 | 0.057136 |
| 509 | 0.082544 |
| 510 | 0.11539 |
| 511 | 0.118449 |
| 512 | 0.076636 |
| 513 | 0.047198 |
| 514 | 0.034985 |
| 515 | 0.047534 |
| 516 | 0.088652 |
| 517 | 0.112728 |
| 518 | 0.16193 |
| 519 | 0.038279 |
| 520 | 0.048701 |
| 521 | 0.053126 |
| 522 | 0.380014 |
| 523 | 0.284973 |
| 524 | 0.194449 |
| 525 | 0.161759 |
| 526 | 0.144795 |
| 527 | 0.123155 |
| 528 | 0.188829 |
| 529 | 0.271993 |
| 530 | 0.245637 |
| 531 | 0.220223 |
| 532 | 0.170368 |
| 533 | 0.157116 |
| 534 | 0.164245 |
| 535 | 0.822143 |
| 536 | 0.625475 |
| 537 | 0.529811 |
| 538 | 0.452193 |
| 539 | 0.21462 |
| 540 | 0.802684 |
| 541 | 0.04091 |
| 542 | 0.045338 |
| 543 | 0.035998 |
| 544 | 0.059436 |
| 545 | 0.063346 |
| 546 | 0.066143 |
| 547 | 0.053158 |
| 548 | 0.04794 |
| 549 | 0.046061 |
| 550 | 0.044528 |
| 551 | 0.041468 |
| 552 | 0.041589 |
| 553 | 0.472232 |
| 554 | 0.597603 |
| 555 | 0.490883 |
| 556 | 0.505865 |
| 557 | 0.389558 |
| 558 | 0.503517 |
| 559 | 0.407523 |
| 560 | 0.401459 |
| 561 | 0.255044 |
| 562 | 0.520983 |
| 563 | 0.534194 |
| 564 | 0.6011 |
| 565 | 0.506029 |
| 566 | 0.548652 |
| 567 | 0.651565 |
| 568 | 0.591832 |
| 569 | 0.55572 |
| 570 | 0.518361 |
| 571 | 0.320449 |
| 572 | 0.582818 |
| 573 | 0.7425 |
| 574 | 0.623199 |
| 575 | 0.162095 |
| 576 | 0.151989 |
| 577 | 0.17483 |
| 578 | 0.188683 |
| 579 | 0.276645 |
| 580 | 0.130648 |
| 581 | 0.125549 |
| 582 | 0.080788 |
| 583 | 0.044321 |
| 584 | 0.100526 |
| 585 | 0.220351 |
| 586 | 0.301256 |
| 587 | 0.192472 |
| 588 | 0.104424 |
| 589 | 0.172923 |
| 590 | 0.106008 |
| 591 | 0.23035 |
| 592 | 0.606225 |
| 593 | 0.502292 |
| 594 | 0.317446 |
| 595 | 0.493078 |
| 596 | 0.438866 |
| 597 | 0.325522 |
| 598 | 0.252568 |
| 599 | 0.247371 |
| 600 | 0.17562 |
| 601 | 0.109506 |
| 602 | 0.15316 |
| 603 | 0.346635 |
| 604 | 0.231105 |
| 605 | 0.396636 |
| 606 | 0.146176 |
| 607 | 0.387703 |
| 608 | 0.14511 |
| 609 | 0.299143 |
| 610 | 0.202447 |
| 611 | 0.426063 |
| 612 | 0.611141 |
| 613 | 0.502614 |
| 614 | 0.601975 |
| 615 | 0.223962 |
| 616 | 0.230348 |
| 617 | 0.097939 |
| 618 | 0.10477 |
| 619 | 0.297694 |
| 620 | 0.402322 |
| 621 | 0.225326 |
| 622 | 0.2918 |
| 623 | 0.676989 |
| 624 | 0.718245 |
| 625 | 1.016323 |
| 626 | 0.699593 |
| 627 | 0.639157 |
| 628 | 0.602432 |
| 629 | 0.614251 |
| 630 | 0.270208 |
| 631 | 0.115875 |
| 632 | 0.232468 |
| 633 | 0.459435 |
| 634 | 0.437206 |
| 635 | 0.61444 |
| 636 | 0.188392 |
| 637 | 0.405305 |
| 638 | 0.290901 |
| 639 | 0.678393 |
| 640 | 0.761975 |
| 641 | 0.780472 |
| 642 | 0.775587 |
| 643 | 0.646567 |
| 644 | 0.479225 |
| 645 | 0.076825 |
| 646 | 0.169707 |
| 647 | 0.590007 |
| 648 | 0.324063 |
| 649 | 0.190573 |
| 650 | 0.314454 |
| 651 | 0.395139 |
| 652 | 1.156984 |
| 653 | 0.14452 |
| 654 | 0.33398 |
| 655 | 0.274171 |
| 656 | 0.15043 |
| 657 | 0.37375 |
| 658 | 0.148435 |
| 659 | 0.217535 |
| 660 | 0.214928 |
| 661 | 0.249702 |
| 662 | 0.217745 |
| 663 | 0.093558 |
| 664 | 0.285438 |
| 665 | 0.144098 |
| 666 | 0.267208 |
| 667 | 0.236559 |
| 668 | 0.138315 |
| 669 | 0.122713 |
| 670 | 0.160543 |
| 671 | 0.149386 |
| 672 | 0.159719 |
| 673 | 0.105695 |
| 674 | 0.148312 |
| 675 | 0.097911 |
| 676 | 0.112123 |
| 677 | 0.78351 |
| 678 | 0.694092 |
| 679 | 0.295124 |
| 680 | 0.308716 |
| 681 | 0.762757 |
| 682 | 0.500033 |
| 683 | 0.370103 |
| 684 | 0.888612 |
| 685 | 0.098633 |
| 686 | 0.927681 |
| 687 | 0.813528 |
| 688 | 0.143951 |
| 689 | 0.260316 |
| 690 | 0.636231 |
| 691 | 0.395169 |
| 692 | 0.326766 |
| 693 | 0.125239 |
| 694 | 1.537567 |
| 695 | 1.021724 |
| 696 | 1.103078 |
| 697 | 0.777753 |
| 698 | 0.791486 |
| 699 | 0.883798 |
| 700 | 0.900414 |
| 701 | 0.311729 |
| 702 | 0.181284 |
| 703 | 0.143289 |
| 704 | 0.064378 |
| 705 | 0.16426 |
| 706 | 0.223649 |
| 707 | 0.258268 |
| 708 | 0.319309 |
| 709 | 0.260845 |
| 710 | 0.159328 |
| 711 | 0.657512 |
| 712 | 0.225481 |
| 713 | 0.429417 |
| 714 | 0.705218 |
| 715 | 0.290625 |
| 716 | 0.241281 |
| 717 | 0.574336 |
| 718 | 0.330863 |
| 719 | 0.482342 |
| 720 | 0.262855 |
| 721 | 0.192895 |
| 722 | 0.241698 |
| 723 | 0.151071 |
| 724 | 0.280897 |
| 725 | 0.090384 |
| 726 | 0.234182 |
| 727 | 0.073217 |
| 728 | 0.107552 |
| 729 | 0.10433 |
| 730 | 0.213264 |
| 731 | 0.128794 |
| 732 | 0.217298 |
| 733 | 0.116695 |
| 734 | 0.105983 |
| 735 | 0.273206 |
| 736 | 0.203489 |
| 737 | 0.108869 |
| 738 | 0.391031 |
| 739 | 0.394769 |
| 740 | 0.355355 |
| 741 | 0.341742 |
| 742 | 0.114805 |
| 743 | 0.212071 |
| 744 | 0.12881 |
| 745 | 0.193224 |
| 746 | 0.093948 |
| 747 | 0.11066 |
| 748 | 0.128907 |
| 749 | 0.096421 |
| 750 | 0.152729 |
| 751 | 0.133725 |
| 752 | 0.192827 |
| 753 | 0.109911 |
| 754 | 0.132019 |
| 755 | 0.108438 |
| 756 | 0.175814 |
| 757 | 0.114354 |
| 758 | 0.075463 |
| 759 | 0.719376 |
| 760 | 0.619404 |
| 761 | 0.668351 |
| 762 | 0.569775 |
| 763 | 0.350729 |
| 764 | 0.675005 |
| 765 | 0.951022 |
| 766 | 0.524659 |
| 767 | 0.152452 |
| 768 | 0.212426 |
| 769 | 0.114684 |
| 770 | 0.21805 |
| 771 | 0.420339 |
| 772 | 0.351305 |
| 773 | 0.115685 |
| 774 | 0.196322 |
| 775 | 0.274337 |
| 776 | 0.239263 |
| 777 | 0.069587 |
| 778 | 0.139793 |
| 779 | 0.139015 |
| 780 | 0.131708 |
| 781 | 0.372504 |
| 782 | 0.301299 |
| 783 | 0.338446 |
| 784 | 0.116848 |
| 785 | 0.074125 |
| 786 | 0.501036 |
| 787 | 0.22936 |
| 788 | 0.046529 |
| 789 | 0.117119 |
| 790 | 0.29552 |
| 791 | 0.338185 |
| 792 | 0.15633 |
| 793 | 0.456109 |
| 794 | 0.332829 |
| 795 | 0.234751 |
| 796 | 0.131613 |
| 797 | 0.082187 |
| 798 | 0.227411 |
| 799 | 0.249635 |
| 800 | 0.039127 |
| 801 | 0.099556 |
| 802 | 0.120163 |
| 803 | 0.075064 |
| 804 | 0.130462 |
| 805 | 0.11331 |
| 806 | 0.079364 |
| 807 | 0.110502 |
| 808 | 0.166745 |
| 809 | 0.330695 |
| 810 | 0.246583 |
| 811 | 0.222047 |
| 812 | 0.140775 |
| 813 | 0.127088 |
| 814 | 0.126184 |
| 815 | 0.076421 |
| 816 | 0.144628 |
| 817 | 0.186798 |
| 818 | 0.122567 |
| 819 | 0.062306 |
| 820 | 0.308397 |
| 821 | 0.30584 |
| 822 | 0.342048 |
| 823 | 0.217299 |
| 824 | 0.160211 |
| 825 | 0.133078 |
| 826 | 0.111217 |
| 827 | 0.136336 |
| 828 | 0.58203 |
| 829 | 0.910387 |
| 830 | 0.906905 |
| 831 | 0.648106 |
| 832 | 0.800597 |
| 833 | 0.578644 |
| 834 | 0.267947 |
| 835 | 0.423202 |
| 836 | 0.430351 |
| 837 | 0.337858 |
| 838 | 0.097618 |
| 839 | 0.110964 |
| 840 | 0.094772 |
| 841 | 1.199796 |
| 842 | 0.07592 |
| 843 | 0.602545 |
| 844 | 0.049966 |
| 845 | 0.106455 |
| 846 | 0.154013 |

### Example 2

[0173] A KM1328 human immortalized myoblast line with an exon 52 deletion was used as a model system. The KM1328 cells were previously immortalized using hTERT and CDK4 (PMID: 22040608). On day-2, 25,000 cells were seeded per well with Skeletal Muscle growth medium (PromoCell (cat #: C-23060), final volume 12.5% HI—FBS and 10,000 units/mL Pen/Strep). On day 0, the Skeletal Muscle growth medium was switched out for Skeletal Muscle differentiation media (DMEM Gibco 11054020, final volume 2% HI—FBS and 10,000 units/mL Pen/Strep). On day 4, 10 micromolar of the individual oligonucleotides were diluted with differentiation media and transferred to desired wells as first treatment. On day 7, 10 micromolar of the individual oligonucleotides were diluted with differentiation media and transferred to desired wells as second treatment. On day 10, the cells were harvested using TaqMan Gene Expression Cells-to-CT (Thermo Fisher Scientific, 55 microliter final lysis volume), 10 microliters of RNA was reverse transcribed, and then 5 microliters of the resulting cDNA were evaluated by qPCR (skip forward primer 5′-GGTGGGTGACCTTGAGGAT-3′ (SEQ ID NO: 1437), skip probe 5′-ATCATCAAGCAGAAGCAGTTGGCC-3′ (SEQ ID NO: 1438), and skip reverse primer 5′-GCCAAGTCATTTGCCACATCTA-3′ (SEQ ID NO: 1439)). A double-stranded DNA fragment of the skipped amplicon (IDT, exon 51 spliced to exon 54) was used to validate the assay and to quantify the number of copies in unknown samples. The data shown is shown as the fold change in exon 53 skipping relative to a positive control ASO.

| | Average Fold | | Average Fold |
|---|---|---|---|
| SEQ ID NO: | Change | SEQ ID NO: | Change |
| 413 | 1.005641 | 1109 | 0.7575 |
| 347 | 1.03 | 1110 | 0.405 |
| 828 | 1.0525 | 1111 | 0.891667 |
| 829 | 0.925 | 1112 | 0.7475 |
| 830 | 1.11875 | 1113 | 0.96625 |
| 831 | 0.985 | 1114 | 0.8 |
| 832 | 1.18 | 1115 | 0.78 |
| 836 | 0.65125 | 1116 | 0.90625 |
| 455 | 1.03 | 1117 | 1.106667 |
| 847 | 2.70375 | 1118 | 1.6675 |
| 848 | 2.49625 | 1119 | 1.4025 |
| 457 | 1.0575 | 1120 | 1.2325 |
| 456 | 0.935 | 1121 | 1.3 |
| 652 | 1.0075 | 522 | 1.5825 |
| 625 | 1.1825 | 523 | 1.205 |
| 624 | 1.245 | 524 | 1.035 |
| 626 | 0.975 | 525 | 0.8075 |
| 627 | 0.97 | 526 | 0.7825 |
| 592 | 0.8075 | 527 | 0.84 |
| 593 | 0.909167 | 528 | 1.2875 |
| 594 | 0.833333 | 529 | 2.4975 |
| 595 | 0.72625 | 530 | 2.85 |
| 596 | 0.619167 | 531 | 1.29 |
| 597 | 0.915833 | 532 | 0.815 |
| 612 | 0.871486 | 533 | 1.2 |
| 613 | 0.9175 | 534 | 0.5325 |
| 614 | 0.869167 | 537 | 1.67 |
| 453 | 0.8225 | 538 | 1.815 |
| 454 | 0.7375 | 1122 | 1.185 |
| 849 | 3.72 | 1123 | 1.18 |
| 809 | 1.201429 | 1124 | 0.9775 |
| 811 | 0.869965 | 1125 | 0.275 |
| 470 | 1.8175 | 1126 | 0.2825 |
| 540 | 6.1925 | 1127 | 0.22 |
| 762 | 0.944375 | 1128 | 3.62 |
| 850 | 0.914167 | 1129 | 2.9875 |
| 851 | 1.13 | 1130 | 3.1075 |
| 852 | 1.014167 | 1131 | 2.4025 |
| 853 | 1.055 | 1132 | 2.71 |
| 452 | 1.185 | 1133 | 2.3225 |
| 539 | 1.33 | 1134 | 1.9575 |
| 854 | 6.31625 | 1135 | 2.14 |
| 855 | 2.59875 | 1136 | 1.955 |
| 856 | 10.5225 | 1137 | 2.64 |
| 857 | 6.095 | 1138 | 1.7475 |
| 858 | 2.68125 | 1139 | 2.8475 |
| 859 | 1.084167 | 1140 | 2.5525 |
| 860 | 4.3075 | 1141 | 2.99 |
| 348 | 0.8025 | 1142 | 3.705 |
| 447 | 1.35 | 1143 | 3.465 |
| 808 | 0.56 | 1144 | 4.403333 |
| 810 | 1.0425 | 1145 | 3.9075 |
| 342 | 0.83504 | 1146 | 1.1025 |
| 833 | 0.815 | 1147 | 0.2425 |
| 467 | 0.565 | 1148 | 1.3275 |
| 469 | 1.095 | 1149 | 1.3625 |
| 349 | 1.1525 | 1150 | 1.8375 |
| 471 | 0.9725 | 1151 | 1.4425 |
| 478 | 0.345 | 1152 | 1.245 |
| 479 | 0.625 | 1153 | 1.355 |
| 480 | 0.3525 | 1154 | 1.245 |
| 841 | 3.0975 | 1155 | 1.3025 |
| 765 | 0.52125 | 1156 | 0.405 |
| 535 | 1.51 | 1157 | 0.4225 |
| 764 | 0.7125 | 1158 | 0.2675 |
| 761 | 0.6675 | 1159 | 1.79 |
| 536 | 1.6825 | 1160 | 0.9375 |
| 843 | 2.67 | 1161 | 1.22 |
| 602 | 0.205 | 1162 | 1.465 |
| 738 | 0.5875 | 1163 | 1.355 |
| 739 | 0.5325 | 1164 | 0.78 |
| 740 | 0.62 | 840 | 0.6125 |
| 741 | 0.765 | 1165 | 1.4975 |
| 861 | 0.9525 | 1166 | 1.435 |
| 862 | 0.6275 | 1167 | 1.44 |
| 863 | 0.4175 | 1168 | 1.7525 |
| 864 | 0.4 | 1169 | 6.7675 |
| 865 | 0.3425 | 1170 | 1.15 |
| 866 | 0.415 | 1171 | 1.38 |
| 867 | 0.35 | 1172 | 1.2125 |
| 868 | 0.845 | 1173 | 1.39 |
| 869 | 0.6575 | 1174 | 1.0675 |
| 870 | 0.4425 | 1175 | 0.99 |
| 603 | 0.3225 | 1176 | 1.5725 |
| 871 | 0.885 | 1177 | 1.5625 |
| 872 | 0.655 | 1178 | 1.4975 |
| 873 | 0.5625 | 1179 | 1.065 |
| 874 | 0.6875 | 1180 | 1.2525 |
| 875 | 0.71 | 1181 | 0.9625 |
| 876 | 0.5175 | 1182 | 1.3 |
| 877 | 0.725 | 1183 | 1.3275 |
| 878 | 0.65 | 1184 | 1.3525 |
| 879 | 0.3425 | 1185 | 1.15 |
| 880 | 0.6 | 1186 | 1.785 |
| 881 | 0.52 | 1187 | 2.0075 |
| 882 | 0.5625 | 1188 | 2.095 |
| 883 | 0.94 | 1189 | 1.9575 |
| 884 | 0.6725 | 1190 | 1.2375 |
| 604 | 0.4525 | 1191 | 1.445 |
| 885 | 0.8825 | 1192 | 1.605 |
| 886 | 0.6875 | 1193 | 1.4075 |
| 887 | 0.4325 | 1194 | 1.5925 |
| 888 | 0.775 | 1195 | 3.325 |
| 889 | 0.6775 | 1196 | 2.2175 |
| 890 | 0.51 | 1197 | 1.895 |
| 891 | 0.77 | 1198 | 2.0125 |
| 892 | 0.73 | 1199 | 2.335 |
| 893 | 0.4875 | 1200 | 1.935 |
| 894 | 0.7525 | 1201 | 1.73 |
| 895 | 0.5375 | 1202 | 2.0325 |
| 896 | 0.7675 | 1203 | 2.005 |
| 897 | 0.79 | 1204 | 1.2475 |
| 898 | 0.7975 | 1205 | 7.8675 |
| 605 | 0.33625 | 1206 | 4.1875 |
| 899 | 0.7175 | 1207 | 1.185 |
| 900 | 0.8775 | 1208 | 0.43 |
| 901 | 0.4025 | 1209 | 1.53 |
| 902 | 0.7825 | 1210 | 2.9425 |
| 903 | 1.01375 | 1211 | 3.165 |
| 904 | 0.885 | 1212 | 2.5875 |
| 759 | 0.9525 | 1213 | 1.975 |
| 760 | 0.61875 | 1214 | 1.165 |
| 763 | 0.485 | 1215 | 1.7725 |
| 766 | 0.4975 | 1216 | 2.295 |
| 611 | 0.88125 | 1217 | 1.9975 |
| 617 | 0.19 | 1218 | 2.02 |
| 905 | 0.82875 | 1219 | 1.055 |
| 906 | 0.7125 | 1220 | 1.6575 |
| 907 | 0.52 | 1221 | 0.6175 |
| 908 | 0.9275 | 1222 | 0.375 |
| 909 | 0.76 | 1223 | 0.235 |
| 910 | 0.55 | 1224 | 0.4875 |
| 911 | 0.695 | 1225 | 0.555 |
| 912 | 0.5125 | 1226 | 0.515 |
| 913 | 0.35 | 1227 | 0.19 |
| 914 | 0.3075 | 1228 | 0.395 |
| 915 | 0.49 | 1229 | 0.98 |
| 916 | 0.32 | 1230 | 0.105 |
| 917 | 0.2075 | 1231 | 0.345 |
| 918 | 0.23 | 1232 | 0.09 |
| 919 | 0.2225 | 1233 | 0.3375 |
| 920 | 0.205 | 1234 | 1.1925 |
| 921 | 0.125 | 1235 | 0.16 |
| 922 | 0.7775 | 1236 | 0.7625 |
| 923 | 0.6425 | 1237 | 0.1425 |
| 924 | 0.545 | 1238 | 0.92 |
| 606 | 0.305 | 1239 | 1.745 |
| 925 | 0.5725 | 1240 | 0.9675 |
| 926 | 0.4625 | 1241 | 1.265 |
| 927 | 0.4075 | 1242 | 0.88 |
| 928 | 0.6275 | 1243 | 0.4725 |
| 929 | 0.5025 | 1244 | 0.91 |
| 930 | 0.375 | 1245 | 1.9 |
| 931 | 0.5575 | 1246 | 1.0075 |
| 932 | 0.515 | 1247 | 0.7425 |
| 933 | 0.4375 | 1248 | 0.4675 |
| 934 | 0.26 | 1249 | 0.7475 |
| 935 | 0.54 | 1250 | 0.78 |
| 936 | 0.565 | 1251 | 0.285 |
| 937 | 0.1675 | 1252 | 0.17 |
| 938 | 0.2725 | 1253 | 1.56 |
| 939 | 0.215 | 1254 | 0.205 |
| 940 | 0.215 | 1255 | 1.715 |
| 941 | 0.1425 | 1256 | 1.495 |
| 942 | 0.7025 | 1257 | 1.285 |
| 943 | 0.645 | 1258 | 0.6525 |
| 607 | 0.715 | 1259 | 0.8275 |
| 944 | 0.8675 | 1260 | 1.7975 |
| 945 | 0.815 | 1261 | 0.505 |
| 946 | 0.8275 | 1262 | 1.3125 |
| 947 | 1.07125 | 1263 | 1.285 |
| 948 | 0.86 | 1264 | 1.58 |
| 949 | 0.605 | 1265 | 1.5075 |
| 950 | 1.015 | 1266 | 0.96 |
| 951 | 0.6625 | 1267 | 1.03 |
| 952 | 0.84 | 1268 | 1.225 |
| 953 | 0.7925 | 1269 | 1.545 |
| 954 | 1.09 | 1270 | 0.11 |
| 955 | 0.97 | 1271 | 0.2625 |
| 956 | 0.6275 | 1272 | 0.94 |
| 957 | 0.74 | 1273 | 0.4925 |
| 958 | 0.655 | 1274 | 0.3475 |
| 959 | 0.5975 | 1275 | 0.725 |
| 960 | 0.62 | 1276 | 0.69 |
| 961 | 0.9975 | 1277 | 0.7725 |
| 962 | 1.1525 | 1278 | 0.54 |
| 618 | 0.436876 | 1279 | 0.8875 |
| 963 | 0.831221 | 1280 | 0.7125 |
| 964 | 0.922637 | 1281 | 0.565 |
| 965 | 0.612314 | 1282 | 0.5 |
| 966 | 0.87697 | 1283 | 0.32 |
| 967 | 0.868321 | 1284 | 0.25 |
| 968 | 0.501353 | 1285 | 0.3425 |
| 969 | 0.672194 | 1286 | 0.3325 |
| 970 | 0.588231 | 1287 | 0.4925 |
| 971 | 0.438984 | 1288 | 0.405 |
| 972 | 0.35034 | 1289 | 0.4675 |
| 973 | 0.450383 | 1290 | 0.2775 |
| 974 | 0.436477 | 1291 | 0.2375 |
| 975 | 0.219905 | 1292 | 1.9175 |
| 976 | 0.209706 | 1293 | 0.8625 |
| 977 | 0.246885 | 1294 | 0.7575 |
| 978 | 0.200489 | 1295 | 0.61 |
| 979 | 0.158851 | 1296 | 0.865 |
| 980 | 0.996173 | 1297 | 1.1875 |
| 981 | 0.881826 | 1298 | 0.728943 |
| 982 | 0.580564 | 1299 | 0.888822 |
| 983 | 0.71 | 1300 | 1.024793 |
| 619 | 0.52 | 1301 | 1.0536 |
| 984 | 0.915 | 1302 | 0.859996 |
| 985 | 0.79 | 1303 | 1.035192 |
| 986 | 0.6325 | 1304 | 0.927026 |
| 987 | 0.825 | 1305 | 1.051433 |
| 988 | 0.72 | 1306 | 0.758934 |
| 989 | 0.4125 | 1307 | 0.750705 |
| 990 | 0.72 | 1308 | 1.132416 |
| 991 | 0.4875 | 1309 | 1.052031 |
| 992 | 0.475 | 1310 | 2.395 |
| 993 | 0.6425 | 1311 | 3.0225 |
| 994 | 0.5175 | 1312 | 3.0325 |
| 995 | 0.3725 | 1313 | 3.1275 |
| 996 | 0.53 | 1314 | 4.47 |
| 997 | 0.2625 | 1315 | 3.84 |
| 998 | 0.2725 | 1316 | 2.0725 |
| 999 | 0.195 | 1317 | 3.5575 |
| 1000 | 0.88375 | 1318 | 1.9175 |
| 1001 | 0.93875 | 1319 | 1.4225 |
| 1002 | 0.7325 | 1320 | 1.4475 |
| 1003 | 0.595 | 1321 | 1.1 |
| 620 | 0.49 | 1322 | 1.2275 |
| 1004 | 0.845 | 1323 | 1.24 |
| 1005 | 0.67 | 1324 | 2.1825 |
| 1006 | 0.4675 | 1325 | 1.0375 |
| 1007 | 0.84 | 1326 | 1.3075 |
| 1008 | 0.6075 | 1327 | 1.685 |
| 1009 | 0.915 | 1328 | 1.41 |
| 1010 | 0.595 | 1329 | 1.2275 |
| 1011 | 0.4625 | 1330 | 1.0875 |
| 1012 | 0.9625 | 1331 | 1.98 |
| 1013 | 0.9525 | 1332 | 1.11 |
| 1014 | 0.4025 | 1333 | 1.155 |
| 1015 | 0.7225 | 1334 | 1.4925 |
| 1016 | 0.395 | 1335 | 1.0575 |
| 1017 | 0.345 | 1336 | 1.09 |
| 1018 | 0.255 | 1337 | 1.7825 |
| 1019 | 0.91875 | 1338 | 1.5425 |
| 1020 | 0.93 | 1339 | 1.405 |
| 1021 | 1.09 | 1340 | 1.2325 |
| 1022 | 0.35 | 1341 | 1.17 |
| 718 | 0.7825 | 1342 | 1.97 |
| 462 | 0.46375 | 1343 | 1.6725 |
| 719 | 0.575 | 1344 | 1.74 |
| 720 | 0.575 | 1345 | 1.7575 |
| 1023 | 0.775 | 1346 | 5.8475 |
| 1024 | 0.6025 | 1347 | 5.61 |
| 1025 | 0.54 | 1348 | 3.9125 |
| 1026 | 0.435 | 1349 | 5.385 |
| 1027 | 0.425 | 1350 | 7.185 |
| 1028 | 0.2275 | 1351 | 5.5975 |
| 1029 | 0.59875 | 1352 | 3.9675 |
| 1030 | 0.615 | 1353 | 3.33 |
| 1031 | 0.285 | 1354 | 3.5725 |
| 1032 | 0.5575 | 1355 | 4.5675 |
| 1033 | 0.305 | 1356 | 4.76 |
| 1034 | 0.3025 | 1357 | 5.2375 |
| 1035 | 0.18 | 1358 | 4.4025 |
| 1036 | 0.9525 | 1359 | 4.9825 |
| 1037 | 0.83125 | 1360 | 4.315 |
| 1038 | 0.89125 | 1361 | 3.605 |
| 463 | 0.6825 | 1362 | 2.415 |
| 1039 | 0.4075 | 1363 | 1.15 |
| 1040 | 0.755 | 1364 | 3.5775 |
| 1041 | 0.8225 | 1365 | 1.8575 |
| 1042 | 0.61 | 1366 | 1.575 |
| 1043 | 0.645 | 1367 | 1.0875 |
| 1044 | 0.6175 | 1368 | 0.5125 |
| 1045 | 0.7925 | 1369 | 2.2025 |
| 1046 | 0.4725 | 1370 | 0.615 |
| 1047 | 0.4125 | 1371 | 0.8675 |
| 1048 | 0.65 | 1372 | 0.4925 |
| 1049 | 0.535 | 1373 | 1.1175 |
| 1050 | 0.345 | 1374 | 1.4825 |
| 1051 | 0.4675 | 1375 | 0.6 |
| 1052 | 0.36 | 1376 | 0.7825 |
| 1053 | 0.2425 | 1377 | 0.645 |
| 1054 | 0.1625 | 1378 | 0.4775 |
| 1055 | 0.8175 | 1379 | 0.735 |
| 1056 | 0.80625 | 1380 | 0.84 |
| 1057 | 0.6975 | 1381 | 0.565 |
| 461 | 0.8325 | 1382 | 0.9875 |
| 1058 | 0.445 | 1383 | 0.7225 |
| 1059 | 0.7875 | 1384 | 1.57 |
| 1060 | 0.8725 | 1385 | 0.8625 |
| 1061 | 0.5675 | 1386 | 0.475 |
| 1062 | 0.93625 | 1387 | 0.4175 |
| 1063 | 0.73 | 1388 | 0.6225 |
| 1064 | 0.505 | 1389 | 1.3175 |
| 1065 | 0.9625 | 1390 | 0.6825 |
| 1066 | 0.5775 | 1391 | 0.6575 |
| 1067 | 0.6025 | 1392 | 0.44 |
| 1068 | 0.815 | 1393 | 1.3525 |
| 1069 | 0.5625 | 1394 | 3.1325 |
| 1070 | 0.3825 | 1395 | 2.4425 |
| 1071 | 0.6975 | 1396 | 0.9275 |
| 1072 | 0.555 | 1397 | 1 |
| 1073 | 0.3375 | 1398 | 0.9825 |
| 1074 | 0.29 | 1399 | 0.82 |
| 1075 | 1.0875 | 1400 | 2.1775 |
| 1076 | 1.1825 | 1401 | 0.9975 |
| 1077 | 0.9725 | 1402 | 1.6025 |
| 1078 | 0.595 | 1403 | 0.5975 |
| 1079 | 0.78 | 1404 | 0.67 |
| 1080 | 0.5775 | 1405 | 3.4525 |
| 1081 | 0.4625 | 1406 | 3.375 |
| 1082 | 0.6175 | 1407 | 1.9775 |
| 1083 | 0.4625 | 1408 | 1.945 |
| 1084 | 0.615 | 1409 | 1.3375 |
| 1085 | 0.4225 | 1410 | 0.7025 |
| 1086 | 0.355 | 1411 | 3.1275 |
| 1087 | 0.38 | 1412 | 1.7875 |
| 1088 | 0.36 | 1413 | 3.4375 |
| 1089 | 0.315 | 1414 | 1.055 |
| 1090 | 0.275 | 1415 | 1.4225 |
| 1091 | 0.32 | 1416 | 1.195 |
| 1092 | 0.33 | 1417 | 0.9975 |
| 1093 | 0.425 | 1418 | 1.3175 |
| 1094 | 0.6375 | 1419 | 1.45 |
| 1095 | 0.655 | 1420 | 0.745 |
| 1096 | 0.3925 | 1421 | 1.0175 |
| 1097 | 0.37 | 1422 | 0.97 |
| 1098 | 0.38 | 1423 | 0.98 |
| 1099 | 0.32 | 1424 | 0.71 |
| 1100 | 0.295 | 1425 | 1 |
| 1101 | 0.3775 | 1426 | 1.2125 |
| 1102 | 0.3075 | 1427 | 0.715 |
| 1103 | 0.3125 | 1428 | 0.975 |
| 1104 | 0.3925 | 1429 | 0.96 |
| 1105 | 0.4525 | 1430 | 1.1375 |
| 1106 | 0.46 | 1431 | 0.8925 |
| 685 | 1.554167 | 1432 | 0.8775 |
| 694 | 1.595 | 1433 | 0.895 |
| 695 | 1.3725 | 1434 | 0.595 |
| 696 | 1.41125 | 1435 | 0.6875 |
| 1107 | 0.91125 | 1436 | 0.9475 |
| 1108 | 0.33 | | |

### Example 3

[0174] The hDMD^{del52}; mdx was used as a model system to assess Exon 53 skipping in vivo (doi.org/10.1371/journal.pone.0193289 and doi.org/10.1371/journal.pone.0244215). In vivo studies were performed in accordance with proper IACUC standards taken from The Guide and underwent IACUC peer review. Five to eight mice aged between 8-10 weeks were administered ASO at 3.42 μmol/kg intravenously via lateral tail vein injection once weekly for 4 consecutive weeks. Tissues were harvested one week after the 4^{th} dose and flash frozen or fixed in 4% PFA as needed. RNA was extracted from frozen samples by tissue pulverization using a Covaris Cryoprep and further homogenized in Zymo RNA/DNA Shield buffer using an Omni Bead Ruptor. 150-200 ng of RNA was used to generate cDNA via RT-PCR with Cells-to-CT Bulk RT Reagents kit (ThermoFisher) and then analyzed by ddPCR for exon 53 skipping with primer sets that enable copy number quantification for the non-skipped exon 53/54 junction, the skipped exon 51/54 junction, approximate total transcript (exon 46/47 junction), and UBC as a housekeeping gene. The % exon 53 skipping was calculated by taking the copies of the exon 51/54 junction, dividing them by the copies of the 46/47 junction and then multiplying by 100.

| | | Diaphragm | | Heart | | Quadricep | |
|---|---|---|---|---|---|---|---|
| | SEQ ID | % Exon 53 | | % Exon 53 | | % Exon 53 | |
| Study | NO: | Skipped | StdDev | Skipped | StdDev | Skipped | StdDev |
| 1 | Vehicle | NA | NA | NA | NA | 0.42 | 0.13 |
| 1 | 401 | NA | NA | NA | NA | 0.62 | 0.21 |
| 1 | 413 | NA | NA | NA | NA | 0.8 | 0.2 |
| 1 | 347 | NA | NA | NA | NA | 0.71 | 0.15 |
| 2 | Vehicle | 1.07 | 0.27 | 0.8 | 0.04 | 0.39 | 0.08 |
| 2 | 455 | 2.27 | 0.77 | 1.53 | 0.17 | 0.88 | 0.12 |
| 2 | 847 | 3.71 | 2.04 | 1.73 | 0.26 | 1.02 | 0.22 |
| 2 | 848 | 1.61 | 0.45 | 1.39 | 0.33 | 0.87 | 0.23 |
| 2 | 828 | 1.45 | 0.12 | 1.15 | 0.1 | 0.84 | 0.22 |
| 2 | 829 | 1.53 | 0.63 | 1.43 | 0.22 | 1.12 | 0.3 |
| 2 | 830 | 1.23 | 0.07 | 1.26 | 0.11 | 0.95 | 0.16 |
| 2 | 831 | 1.73 | 0.25 | 1.57 | 0.22 | 1.05 | 0.26 |
| 2 | 832 | 1.51 | 0.65 | 1.41 | 0.13 | 1 | 0.14 |
| 2 | 836 | 2.24 | 0.68 | 1.22 | 0.31 | 0.86 | 0.08 |
| 3 | Vehicle | 0.95 | 0.12 | 0.89 | 0.07 | 0.6 | 0.24 |
| 3 | 453 | 1.48 | 0.4 | 1.47 | 0.15 | 0.82 | 0.2 |
| 3 | 454 | 1.17 | 0.22 | 1.21 | 0.1 | 1.04 | 0.46 |
| 3 | 456 | 2.36 | 2.07 | 1.42 | 0.25 | 0.76 | 0.16 |
| 3 | 457 | 2.18 | 1.21 | 1.13 | 0.15 | 0.85 | 0.26 |
| 3 | 592 | 0.82 | 0.13 | 1.16 | 0.2 | 0.74 | 0.27 |
| 3 | 593 | 0.84 | 0.2 | 1.05 | 0.12 | 0.64 | 0.15 |
| 3 | 594 | 1.06 | 0.16 | 1.19 | 0.19 | 0.89 | 0.18 |
| 3 | 595 | 1.14 | 0.32 | 1.23 | 0.16 | 0.68 | 0.09 |
| 3 | 596 | 1.12 | 0.35 | 1.4 | 0.18 | 1.07 | 0.4 |
| 3 | 597 | 1.16 | 0.18 | 1.33 | 0.16 | 0.97 | 0.18 |
| 3 | 612 | 1.19 | 0.36 | 1.49 | 0.41 | 0.84 | 0.25 |
| 3 | 613 | 2.11 | 1.96 | 1.76 | 0.47 | 0.87 | 0.22 |
| 3 | 614 | 1.28 | 0.26 | 1.23 | 0.21 | 0.84 | 0.36 |
| 3 | 624 | 1.47 | 0.36 | 1.13 | 0.06 | 0.74 | 0.14 |
| 3 | 625 | 2.1 | 0.93 | 1.14 | 0.25 | 0.81 | 0.13 |
| 3 | 626 | 1.08 | 0.07 | 1.18 | 0.18 | 1.31 | 0.63 |
| 3 | 627 | 3.26 | 2.17 | 1.6 | 0.45 | 1 | 0.21 |
| 3 | 652 | 1.4 | 0.18 | 1.69 | 0.17 | 1.22 | 0.7 |
| 3 | 849 | 1.4 | 0.21 | 1.25 | 0.31 | 0.59 | 0.09 |
| 4 | Vehicle | NA | NA | NA | NA | 0.47 | 0.11 |
| 4 | 452 | NA | NA | NA | NA | 0.63 | 0.23 |
| 4 | 470 | NA | NA | NA | NA | 0.63 | 0.12 |
| 4 | 539 | NA | NA | NA | NA | 1.2 | 1.07 |
| 4 | 540 | NA | NA | NA | NA | 0.8 | 0.1 |
| 4 | 762 | NA | NA | NA | NA | 0.87 | 0.07 |
| 4 | 850 | NA | NA | NA | NA | 0.92 | 0.28 |
| 4 | 851 | NA | NA | NA | NA | 0.76 | 0.13 |
| 4 | 852 | NA | NA | NA | NA | 0.92 | 0.33 |
| 4 | 853 | NA | NA | NA | NA | 0.99 | 0.41 |
| 4 | 858 | NA | NA | NA | NA | 0.9 | 0.34 |
| 4 | 854 | NA | NA | NA | NA | 0.72 | 0.2 |
| 4 | 855 | NA | NA | NA | NA | 0.87 | 0.07 |
| 4 | 856 | NA | NA | NA | NA | 0.86 | 0.19 |
| 4 | 857 | NA | NA | NA | NA | 0.99 | 0.3 |
| 4 | 859 | NA | NA | NA | NA | 1.3 | 0.91 |
| 4 | 860 | NA | NA | NA | NA | 0.82 | 0.04 |
| 4 | 809 | NA | NA | NA | NA | 0.87 | 0.27 |
| 4 | 811 | NA | NA | NA | NA | 0.51 | 0.2 |

[0175] This disclosure is not to be limited in scope by the embodiments disclosed in the examples which are intended as single illustrations of individual aspects, and any equivalents are within the scope of this disclosure. Various modifications in addition to those shown and described herein will become apparent to those skilled in the art from the foregoing description. Such modifications are intended to fall within the scope of the appended claims.

[0176] Various references such as patents, patent applications, and publications are cited herein, the disclosures of which are hereby incorporated by reference herein in their entireties.

The application's sequence listing, which the Patent Office published only in electronic form, follows.

SEQUENCE LISTING (1439 sequences)

SEQ ID NO: 1 - RNA, 18 nt, synthetic construct
  source 1..18: mol_type = other RNA; note = Antisense oligonucleotide
  modified_base 1: mod_base = OTHER; note = thymine
  modified_base 5: mod_base = OTHER; note = thymine
  modified_base 8: mod_base = OTHER; note = thymine
  modified_base 11: mod_base = OTHER; note = thymine
  modified_base 13: mod_base = OTHER; note = thymine
taaatgctagtctggagg

SEQ ID NO: 2 - RNA, 18 nt, synthetic construct
  source 1..18: mol_type = other RNA; note = Antisense oligonucleotide
  modified_base 2: mod_base = OTHER; note = thymine
  modified_base 5: mod_base = OTHER; note = thymine
  modified_base 9: mod_base = OTHER; note = thymine
  modified_base 12: mod_base = OTHER; note = thymine
  modified_base 15: mod_base = OTHER; note = thymine
  modified_base 17: mod_base = OTHER; note = thymine
gtagtaaatgctagtctg

SEQ ID NO: 3 - RNA, 18 nt, synthetic construct
  source 1..18: mol_type = other RNA; note = Antisense oligonucleotide
  modified_base 2: mod_base = OTHER; note = thymine
  modified_base 4: mod_base = OTHER; note = thymine
  modified_base 7: mod_base = OTHER; note = thymine
  modified_base 10: mod_base = OTHER; note = thymine
  modified_base 14: mod_base = OTHER; note = thymine
  modified_base 17: mod_base = OTHER; note = thymine
atatagtagtaaatgcta

SEQ ID NO: 4 - RNA, 18 nt, synthetic construct
  source 1..18: mol_type = other RNA; note = Antisense oligonucleotide
  modified_base 1: mod_base = OTHER; note = thymine
  modified_base 5: mod_base = OTHER; note = thymine
  modified_base 7: mod_base = OTHER; note = thymine
  modified_base 9: mod_base = OTHER; note = thymine
  modified_base 12: mod_base = OTHER; note = thymine
  modified_base 15: mod_base = OTHER; note = thymine
taaatatatagtagtaaa

SEQ ID NO: 5 - RNA, 18 nt, synthetic construct
  source 1..18: mol_type = other RNA; note = Antisense oligonucleotide
  modified_base 6: mod_base = OTHER; note = thymine
  modified_base 10: mod_base = OTHER; note = thymine
  modified_base 12: mod_base = OTHER; note = thymine
  modified_base 14: mod_base = OTHER; note = thymine
  modified_base 17: mod_base = OTHER; note = thymine
aaaaataaatatatagta

SEQ ID NO: 6 - RNA, 18 nt, synthetic construct
  source 1..18: mol_type = other RNA; note = Antisense oligonucleotide
  modified_base 11: mod_base = OTHER; note = thymine
  modified_base 15: mod_base = OTHER; note = thymine
  modified_base 17: mod_base = OTHER; note = thymine
aaaggaaaaataaatata

SEQ ID NO: 7 - RNA, 18 nt, synthetic construct
  source 1..18: mol_type = other RNA; note = Antisense oligonucleotide
  modified_base 4: mod_base = OTHER; note = thymine
  modified_base 16: mod_base = OTHER; note = thymine
gaataaaaggaaaaataa

SEQ ID NO: 8 - RNA, 18 nt, synthetic construct
  source 1..18: mol_type = other RNA; note = Antisense oligonucleotide
  modified_base 4: mod_base = OTHER; note = thymine
  modified_base 9: mod_base = OTHER; note = thymine
aactagaataaaaggaaa

SEQ ID NO: 9 - RNA, 18 nt, synthetic construct
  source 1..18: mol_type = other RNA; note = Antisense oligonucleotide
  modified_base 2: mod_base = OTHER; note = thymine
  modified_base 3: mod_base = OTHER; note = thymine
  modified_base 4: mod_base = OTHER; note = thymine
  modified_base 9: mod_base = OTHER; note = thymine
  modified_base 14: mod_base = OTHER; note = thymine
ctttcaactagaataaaa

SEQ ID NO: 10 - RNA, 18 nt, synthetic construct
  source 1..18: mol_type = other RNA; note = Antisense oligonucleotide
  modified_base 4: mod_base = OTHER; note = thymine
  modified_base 5: mod_base = OTHER; note = thymine
  modified_base 7: mod_base = OTHER; note = thymine
  modified_base 8: mod_base = OTHER; note = thymine
  modified_base 9: mod_base = OTHER; note = thymine
  modified_base 14: mod_base = OTHER; note = thymine
gaattctttcaactagaa

SEQ ID NO: 11 - RNA, 18 nt, synthetic construct
  source 1..18: mol_type = other RNA; note = Antisense oligonucleotide
  modified_base 2: mod_base = OTHER; note = thymine
  modified_base 3: mod_base = OTHER; note = thymine
  modified_base 5: mod_base = OTHER; note = thymine
  modified_base 9: mod_base = OTHER; note = thymine
  modified_base 10: mod_base = OTHER; note = thymine
  modified_base 12: mod_base = OTHER; note = thymine
  modified_base 13: mod_base = OTHER; note = thymine
  modified_base 14: mod_base = OTHER; note = thymine
attctgaattctttcaac

SEQ ID NO: 12 - RNA, 18 nt, synthetic construct
  source 1..18: mol_type = other RNA; note = Antisense oligonucleotide
  modified_base 4: mod_base = OTHER; note = thymine
  modified_base 7: mod_base = OTHER; note = thymine
  modified_base 8: mod_base = OTHER; note = thymine
  modified_base 10: mod_base = OTHER; note = thymine
  modified_base 14: mod_base = OTHER; note = thymine
  modified_base 15: mod_base = OTHER; note = thymine
  modified_base 17: mod_base = OTHER; note = thymine
  modified_base 18: mod_base = OTHER; note = thymine
cactgattctgaattctt

SEQ ID NO: 13 - RNA, 18 nt, synthetic construct
  source 1..18: mol_type = other RNA; note = Antisense oligonucleotide
  modified_base 3: mod_base = OTHER; note = thymine
  modified_base 9: mod_base = OTHER; note = thymine
  modified_base 12: mod_base = OTHER; note = thymine
  modified_base 13: mod_base = OTHER; note = thymine
  modified_base 15: mod_base = OTHER; note = thymine
catcccactgattctgaa

SEQ ID NO: 14 - RNA, 18 nt, synthetic construct
  source 1..18: mol_type = other RNA; note = Antisense oligonucleotide
  modified_base 1: mod_base = OTHER; note = thymine
  modified_base 4: mod_base = OTHER; note = thymine
  modified_base 5: mod_base = OTHER; note = thymine
  modified_base 8: mod_base = OTHER; note = thymine
  modified_base 14: mod_base = OTHER; note = thymine
  modified_base 17: mod_base = OTHER; note = thymine
  modified_base 18: mod_base = OTHER; note = thymine
tacttcatcccactgatt

SEQ ID NO: 15 - RNA, 18 nt, synthetic construct
  source 1..18: mol_type = other RNA; note = Antisense oligonucleotide
  modified_base 1: mod_base = OTHER; note = thymine
  modified_base 3: mod_base = OTHER; note = thymine
  modified_base 4: mod_base = OTHER; note = thymine
  modified_base 6: mod_base = OTHER; note = thymine
  modified_base 9: mod_base = OTHER; note = thymine
  modified_base 10: mod_base = OTHER; note = thymine
  modified_base 13: mod_base = OTHER; note = thymine
tcttgtacttcatcccac

SEQ ID NO: 16 - RNA, 18 nt, synthetic construct
  source 1..18: mol_type = other RNA; note = Antisense oligonucleotide
  modified_base 3: mod_base = OTHER; note = thymine
  modified_base 5: mod_base = OTHER; note = thymine
  modified_base 6: mod_base = OTHER; note = thymine
  modified_base 8: mod_base = OTHER; note = thymine
  modified_base 9: mod_base = OTHER; note = thymine
  modified_base 11: mod_base = OTHER; note = thymine
  modified_base 14: mod_base = OTHER; note = thymine
  modified_base 15: mod_base = OTHER; note = thymine
  modified_base 18: mod_base = OTHER; note = thymine
ggtgttcttgtacttcat

SEQ ID NO: 17 - RNA, 18 nt, synthetic construct
  source 1..18: mol_type = other RNA; note = Antisense oligonucleotide
  modified_base 2: mod_base = OTHER; note = thymine
  modified_base 8: mod_base = OTHER; note = thymine
  modified_base 10: mod_base = OTHER; note = thymine
  modified_base 11: mod_base = OTHER; note = thymine
  modified_base 13: mod_base = OTHER; note = thymine
  modified_base 14: mod_base = OTHER; note = thymine
  modified_base 16: mod_base = OTHER; note = thymine
ctgaaggtgttcttgtac

SEQ ID NO: 18 - RNA, 18 nt, synthetic construct
  source 1..18: mol_type = other RNA; note = Antisense oligonucleotide
  modified_base 4: mod_base = OTHER; note = thymine
  modified_base 5: mod_base = OTHER; note = thymine
  modified_base 7: mod_base = OTHER; note = thymine
  modified_base 13: mod_base = OTHER; note = thymine
  modified_base 15: mod_base = OTHER; note = thymine
  modified_base 16: mod_base = OTHER; note = thymine
  modified_base 18: mod_base = OTHER; note = thymine
cggttctgaaggtgttct

SEQ ID NO: 19 - RNA, 18 nt, synthetic construct
  source 1..18: mol_type = other RNA; note = Antisense oligonucleotide
  modified_base 4: mod_base = OTHER; note = thymine
  modified_base 9: mod_base = OTHER; note = thymine
  modified_base 10: mod_base = OTHER; note = thymine
  modified_base 12: mod_base = OTHER; note = thymine
  modified_base 18: mod_base = OTHER; note = thymine
gcctccggttctgaaggt

SEQ ID NO: 20 - RNA, 18 nt, synthetic construct
  source 1..18: mol_type = other RNA; note = Antisense oligonucleotide
  modified_base 2: mod_base = OTHER; note = thymine
  modified_base 4: mod_base = OTHER; note = thymine
  modified_base 5: mod_base = OTHER; note = thymine
  modified_base 9: mod_base = OTHER; note = thymine
  modified_base 14: mod_base = OTHER; note = thymine
  modified_base 15: mod_base = OTHER; note = thymine
  modified_base 17: mod_base = OTHER; note = thymine
ctgttgcctccggttctg

SEQ ID NO: 21 - RNA, 18 nt, synthetic construct
  source 1..18: mol_type = other RNA; note = Antisense oligonucleotide
  modified_base 1: mod_base = OTHER; note = thymine
  modified_base 2: mod_base = OTHER; note = thymine
  modified_base 7: mod_base = OTHER; note = thymine
  modified_base 9: mod_base = OTHER; note = thymine
  modified_base 10: mod_base = OTHER; note = thymine
  modified_base 14: mod_base = OTHER; note = thymine
ttcaactgttgcctccgg

SEQ ID NO: 22 - RNA, 18 nt, synthetic construct
  source 1..18: mol_type = other RNA; note = Antisense oligonucleotide
  modified_base 1: mod_base = OTHER; note = thymine
  modified_base 2: mod_base = OTHER; note = thymine
  modified_base 3: mod_base = OTHER; note = thymine
  modified_base 6: mod_base = OTHER; note = thymine
  modified_base 7: mod_base = OTHER; note = thymine
  modified_base 12: mod_base = OTHER; note = thymine
  modified_base 14: mod_base = OTHER; note = thymine
  modified_base 15: mod_base = OTHER; note = thymine
tttcattcaactgttgcc

SEQ ID NO: 23 - RNA, 18 nt, synthetic construct
  source 1..18: mol_type = other RNA; note = Antisense oligonucleotide
  modified_base 1: mod_base = OTHER; note = thymine
  modified_base 6: mod_base = OTHER; note = thymine
  modified_base 7: mod_base = OTHER; note = thymine
  modified_base 8: mod_base = OTHER; note = thymine
  modified_base 11: mod_base = OTHER; note = thymine
  modified_base 12: mod_base = OTHER; note = thymine
  modified_base 17: mod_base = OTHER; note = thymine
taacatttcattcaactg

SEQ ID NO: 24 - RNA, 18 nt, synthetic construct
  source 1..18: mol_type = other RNA; note = Antisense oligonucleotide
  modified_base 1: mod_base = OTHER; note = thymine
  modified_base 4: mod_base = OTHER; note = thymine
  modified_base 5: mod_base = OTHER; note = thymine
  modified_base 6: mod_base = OTHER; note = thymine
  modified_base 11: mod_base = OTHER; note = thymine
  modified_base 12: mod_base = OTHER; note = thymine
  modified_base 13: mod_base = OTHER; note = thymine
  modified_base 16: mod_base = OTHER; note = thymine
  modified_base 17: mod_base = OTHER; note = thymine
tcctttaacatttcattc

SEQ ID NO: 25 - RNA, 18 nt, synthetic construct
  source 1..18: mol_type = other RNA; note = Antisense oligonucleotide
  modified_base 1: mod_base = OTHER; note = thymine
  modified_base 2: mod_base = OTHER; note = thymine
  modified_base 6: mod_base = OTHER; note = thymine
  modified_base 9: mod_base = OTHER; note = thymine
  modified_base 10: mod_base = OTHER; note = thymine
  modified_base 11: mod_base = OTHER; note = thymine
  modified_base 16: mod_base = OTHER; note = thymine
  modified_base 17: mod_base = OTHER; note = thymine
  modified_base 18: mod_base = OTHER; note = thymine
ttgaatcctttaacattt

SEQ ID NO: 26 - RNA, 18 nt, synthetic construct
  source 1..18: mol_type = other RNA; note = Antisense oligonucleotide
  modified_base 1: mod_base = OTHER; note = thymine
  modified_base 2: mod_base = OTHER; note = thymine
  modified_base 4: mod_base = OTHER; note = thymine
  modified_base 6: mod_base = OTHER; note = thymine
  modified_base 7: mod_base = OTHER; note = thymine
  modified_base 11: mod_base = OTHER; note = thymine
  modified_base 14: mod_base = OTHER; note = thymine
  modified_base 15: mod_base = OTHER; note = thymine
  modified_base 16: mod_base = OTHER; note = thymine
ttgtgttgaatcctttaa

SEQ ID NO: 27 - RNA, 18 nt, synthetic construct
  source 1..18: mol_type = other RNA; note = Antisense oligonucleotide
  modified_base 6: mod_base = OTHER; note = thymine
  modified_base 7: mod_base = OTHER; note = thymine
  modified_base 9: mod_base = OTHER; note = thymine
  modified_base 11: mod_base = OTHER; note = thymine
  modified_base 12: mod_base = OTHER; note = thymine
  modified_base 16: mod_base = OTHER; note = thymine
agccattgtgttgaatcc

SEQ ID NO: 28 - RNA, 18 nt, synthetic construct
  source 1..18: mol_type = other RNA; note = Antisense oligonucleotide
  modified_base 2: mod_base = OTHER; note = thymine
  modified_base 3: mod_base = OTHER; note = thymine
  modified_base 11: mod_base = OTHER; note = thymine
  modified_base 12: mod_base = OTHER; note = thymine
  modified_base 14: mod_base = OTHER; note = thymine
  modified_base 16: mod_base = OTHER; note = thymine
  modified_base 17: mod_base = OTHER; note = thymine
cttccagccattgtgttg

SEQ ID NO: 29 - RNA, 18 nt, synthetic construct
  source 1..18: mol_type = other RNA; note = Antisense oligonucleotide
  modified_base 2: mod_base = OTHER; note = thymine
  modified_base 3: mod_base = OTHER; note = thymine
  modified_base 7: mod_base = OTHER; note = thymine
  modified_base 8: mod_base = OTHER; note = thymine
  modified_base 16: mod_base = OTHER; note = thymine
  modified_base 17: mod_base = OTHER; note = thymine
cttagcttccagccattg

SEQ ID NO: 30 - RNA, 18 nt, synthetic construct
  source 1..18: mol_type = other RNA; note = Antisense oligonucleotide
  modified_base 1: mod_base = OTHER; note = thymine
  modified_base 3: mod_base = OTHER; note = thymine
  modified_base 4: mod_base = OTHER; note = thymine
  modified_base 7: mod_base = OTHER; note = thymine
  modified_base 8: mod_base = OTHER; note = thymine
  modified_base 12: mod_base = OTHER; note = thymine
  modified_base 13: mod_base = OTHER; note = thymine
tcttccttagcttccagc

SEQ ID NO: 31 - RNA, 18 nt, synthetic construct
  source 1..18: mol_type = other RNA; note = Antisense oligonucleotide
  modified_base 5: mod_base = OTHER; note = thymine
  modified_base 6: mod_base = OTHER; note = thymine
  modified_base 8: mod_base = OTHER; note = thymine
  modified_base 9: mod_base = OTHER; note = thymine
  modified_base 12: mod_base = OTHER; note = thymine
  modified_base 13: mod_base = OTHER; note = thymine
  modified_base 17: mod_base = OTHER; note = thymine
  modified_base 18: mod_base = OTHER; note = thymine
cagcttcttccttagctt

SEQ ID NO: 32 - RNA, 18 nt, synthetic construct
  source 1..18: mol_type = other RNA; note = Antisense oligonucleotide
  modified_base 2: mod_base = OTHER; note = thymine
  modified_base 5: mod_base = OTHER; note = thymine
  modified_base 10: mod_base = OTHER; note = thymine
  modified_base 11: mod_base = OTHER; note = thymine
  modified_base 13: mod_base = OTHER; note = thymine
  modified_base 14: mod_base = OTHER; note = thymine
  modified_base 17: mod_base = OTHER; note = thymine
  modified_base 18: mod_base = OTHER; note = thymine
ctgctcagcttcttcctt

SEQ ID NO: 33 - RNA, 18 nt, synthetic construct
  source 1..18: mol_type = other RNA; note = Antisense oligonucleotide
  modified_base 7: mod_base = OTHER; note = thymine
  modified_base 10: mod_base = OTHER; note = thymine
  modified_base 15: mod_base = OTHER; note = thymine
  modified_base 16: mod_base = OTHER; note = thymine
  modified_base 18: mod_base = OTHER; note = thymine
aagacctgctcagcttct

SEQ ID NO: 34 - RNA, 18 nt, synthetic construct
  source 1..18: mol_type = other RNA; note = Antisense oligonucleotide
  modified_base 2: mod_base = OTHER; note = thymine
  modified_base 5: mod_base = OTHER; note = thymine
  modified_base 12: mod_base = OTHER; note = thymine
  modified_base 15: mod_base = OTHER; note = thymine
gtcctaagacctgctcag

SEQ ID NO: 35 - RNA, 18 nt, synthetic construct
  source 1..18: mol_type = other RNA; note = Antisense oligonucleotide
  modified_base 5: mod_base = OTHER; note = thymine
  modified_base 7: mod_base = OTHER; note = thymine
  modified_base 10: mod_base = OTHER; note = thymine
  modified_base 17: mod_base = OTHER; note = thymine
ggcctgtcctaagacctg

SEQ ID NO: 36 - RNA, 18 nt, synthetic construct
  source 1..18: mol_type = other RNA; note = Antisense oligonucleotide
  modified_base 3: mod_base = OTHER; note = thymine
  modified_base 5: mod_base = OTHER; note = thymine
  modified_base 10: mod_base = OTHER; note = thymine
  modified_base 12: mod_base = OTHER; note = thymine
  modified_base 15: mod_base = OTHER; note = thymine
gctctggcctgtcctaag

SEQ ID NO: 37 - RNA, 18 nt, synthetic construct
  source 1..18: mol_type = other RNA; note = Antisense oligonucleotide
  modified_base 3: mod_base = OTHER; note = thymine
  modified_base 4: mod_base = OTHER; note = thymine
  modified_base 8: mod_base = OTHER; note = thymine
  modified_base 10: mod_base = OTHER; note = thymine
  modified_base 15: mod_base = OTHER; note = thymine
  modified_base 17: mod_base = OTHER; note = thymine
gcttggctctggcctgtc

SEQ ID NO: 38 - RNA, 18 nt, synthetic construct
  source 1..18: mol_type = other RNA; note = Antisense oligonucleotide
  modified_base 2: mod_base = OTHER; note = thymine
  modified_base 8: mod_base = OTHER; note = thymine
  modified_base 9: mod_base = OTHER; note = thymine
  modified_base 13: mod_base = OTHER; note = thymine
  modified_base 15: mod_base = OTHER; note = thymine
ctcaagcttggctctggc

SEQ ID NO: 39 - RNA, 18 nt, synthetic construct
  source 1..18: mol_type = other RNA; note = Antisense oligonucleotide
  modified_base 3: mod_base = OTHER; note = thymine
  modified_base 7: mod_base = OTHER; note = thymine
  modified_base 13: mod_base = OTHER; note = thymine
  modified_base 14: mod_base = OTHER; note = thymine
  modified_base 18: mod_base = OTHER; note = thymine
catgactcaagcttggct

SEQ ID NO: 40 - RNA, 18 nt, synthetic construct
  source 1..18: mol_type = other RNA; note = Antisense oligonucleotide
  modified_base 3: mod_base = OTHER; note = thymine
  modified_base 4: mod_base = OTHER; note = thymine
  modified_base 8: mod_base = OTHER; note = thymine
  modified_base 12: mod_base = OTHER; note = thymine
  modified_base 18: mod_base = OTHER; note = thymine
ccttccatgactcaagct

SEQ ID NO: 41 - RNA, 18 nt, synthetic construct
  source 1..18: mol_type = other RNA; note = Antisense oligonucleotide
  modified_base 5: mod_base = OTHER; note = thymine
  modified_base 8: mod_base = OTHER; note = thymine
  modified_base 9: mod_base = OTHER; note = thymine
  modified_base 13: mod_base = OTHER; note = thymine
  modified_base 17: mod_base = OTHER; note = thymine
accctccttccatgactc

SEQ ID NO: 42 - RNA, 18 nt, synthetic construct
  source 1..18: mol_type = other RNA; note = Antisense oligonucleotide
  modified_base 1: mod_base = OTHER; note = thymine
  modified_base 10: mod_base = OTHER; note = thymine
  modified_base 13: mod_base = OTHER; note = thymine
  modified_base 14: mod_base = OTHER; note = thymine
  modified_base 18: mod_base = OTHER; note = thymine
tagggaccctccttccat

SEQ ID NO: 43 - RNA, 18 nt, synthetic construct
  source 1..18: mol_type = other RNA; note = Antisense oligonucleotide
  modified_base 2: mod_base = OTHER; note = thymine
  modified_base 4: mod_base = OTHER; note = thymine
  modified_base 6: mod_base = OTHER; note = thymine
  modified_base 15: mod_base = OTHER; note = thymine
  modified_base 18: mod_base = OTHER; note = thymine
ctgtatagggaccctcct

SEQ ID NO: 44 - RNA, 18 nt, synthetic construct
  source 1..18: mol_type = other RNA; note = Antisense oligonucleotide
  modified_base 2: mod_base = OTHER; note = thymine
  modified_base 4: mod_base = OTHER; note = thymine
  modified_base 7: mod_base = OTHER; note = thymine
  modified_base 9: mod_base = OTHER; note = thymine
  modified_base 11: mod_base = OTHER; note = thymine
atctactgtatagggacc

SEQ ID NO: 45 - RNA, 18 nt, synthetic construct
  source 1..18: mol_type = other RNA; note = Antisense oligonucleotide
  modified_base 2: mod_base = OTHER; note = thymine
  modified_base 3: mod_base = OTHER; note = thymine
  modified_base 7: mod_base = OTHER; note = thymine
  modified_base 9: mod_base = OTHER; note = thymine
  modified_base 12: mod_base = OTHER; note = thymine
  modified_base 14: mod_base = OTHER; note = thymine
  modified_base 16: mod_base = OTHER; note = thymine
attgcatctactgtatag

SEQ ID NO: 46 - RNA, 18 nt, synthetic construct
  source 1..18: mol_type = other RNA; note = Antisense oligonucleotide
  modified_base 1: mod_base = OTHER; note = thymine
  modified_base 2: mod_base = OTHER; note = thymine
  modified_base 3: mod_base = OTHER; note = thymine
  modified_base 7: mod_base = OTHER; note = thymine
  modified_base 8: mod_base = OTHER; note = thymine
  modified_base 12: mod_base = OTHER; note = thymine
  modified_base 14: mod_base = OTHER; note = thymine
  modified_base 17: mod_base = OTHER; note = thymine
tttggattgcatctactg

SEQ ID NO: 47 - RNA, 18 nt, synthetic construct
  source 1..18: mol_type = other RNA; note = Antisense oligonucleotide
  modified_base 1: mod_base = OTHER; note = thymine
  modified_base 2: mod_base = OTHER; note = thymine
  modified_base 3: mod_base = OTHER; note = thymine
  modified_base 5: mod_base = OTHER; note = thymine
  modified_base 6: mod_base = OTHER; note = thymine
  modified_base 7: mod_base = OTHER; note = thymine
  modified_base 8: mod_base = OTHER; note = thymine
  modified_base 12: mod_base = OTHER; note = thymine
  modified_base 13: mod_base = OTHER; note = thymine
  modified_base 17: mod_base = OTHER; note = thymine
tttcttttggattgcatc

SEQ ID NO: 48 - RNA, 18 nt, synthetic construct
  source 1..18: mol_type = other RNA; note = Antisense oligonucleotide
  modified_base 2: mod_base = OTHER; note = thymine
  modified_base 5: mod_base = OTHER; note = thymine
  modified_base 6: mod_base = OTHER; note = thymine
  modified_base 7: mod_base = OTHER; note = thymine
  modified_base 8: mod_base = OTHER; note = thymine
  modified_base 10: mod_base = OTHER; note = thymine
  modified_base 11: mod_base = OTHER; note = thymine
  modified_base 12: mod_base = OTHER; note = thymine
  modified_base 13: mod_base = OTHER; note = thymine
  modified_base 17: mod_base = OTHER; note = thymine
  modified_base 18: mod_base = OTHER; note = thymine
gtgattttcttttggatt

SEQ ID NO: 49 - RNA, 18 nt, synthetic construct
  source 1..18: mol_type = other RNA; note = Antisense oligonucleotide
  modified_base 1: mod_base = OTHER; note = thymine
  modified_base 2: mod_base = OTHER; note = thymine
  modified_base 3: mod_base = OTHER; note = thymine
  modified_base 5: mod_base = OTHER; note = thymine
  modified_base 7: mod_base = OTHER; note = thymine
  modified_base 10: mod_base = OTHER; note = thymine
  modified_base 11: mod_base = OTHER; note = thymine
  modified_base 12: mod_base = OTHER; note = thymine
  modified_base 13: mod_base = OTHER; note = thymine
  modified_base 15: mod_base = OTHER; note = thymine
  modified_base 16: mod_base = OTHER; note = thymine
  modified_base 17: mod_base = OTHER; note = thymine
  modified_base 18: mod_base = OTHER; note = thymine
tttctgtgattttctttt

SEQ ID NO: 50 - RNA, 18 nt, synthetic construct
  source 1..18: mol_type = other RNA; note = Antisense oligonucleotide
  modified_base 2: mod_base = OTHER; note = thymine
  modified_base 3: mod_base = OTHER; note = thymine
  modified_base 6: mod_base = OTHER; note = thymine
  modified_base 7: mod_base = OTHER; note = thymine
  modified_base 8: mod_base = OTHER; note = thymine
  modified_base 10: mod_base = OTHER; note = thymine
  modified_base 12: mod_base = OTHER; note = thymine
  modified_base 15: mod_base = OTHER; note = thymine
  modified_base 16: mod_base = OTHER; note = thymine
  modified_base 17: mod_base = OTHER; note = thymine
  modified_base 18: mod_base = OTHER; note = thymine
cttggtttctgtgatttt

SEQ ID NO: 51 - RNA, 18 nt, synthetic construct
  source 1..18: mol_type = other RNA; note = Antisense oligonucleotide
  modified_base 2: mod_base = OTHER; note = thymine
  modified_base 7: mod_base = OTHER; note = thymine
  modified_base 8: mod_base = OTHER; note = thymine
  modified_base 11: mod_base = OTHER; note = thymine
  modified_base 12: mod_base = OTHER; note = thymine
  modified_base 13: mod_base = OTHER; note = thymine
  modified_base 15: mod_base = OTHER; note = thymine
  modified_base 17: mod_base = OTHER; note = thymine
ctaaccttggtttctgtg

SEQ ID NO: 52 - RNA, 18 nt, synthetic construct
  source 1..18: mol_type = other RNA; note = Antisense oligonucleotide
  modified_base 1: mod_base = OTHER; note = thymine
  modified_base 4: mod_base = OTHER; note = thymine
  modified_base 7: mod_base = OTHER; note = thymine
  modified_base 12: mod_base = OTHER; note = thymine
  modified_base 13: mod_base = OTHER; note = thymine
  modified_base 16: mod_base = OTHER; note = thymine
  modified_base 17: mod_base = OTHER; note = thymine
  modified_base 18: mod_base = OTHER; note = thymine
tgatactaaccttggttt

SEQ ID NO: 53 - RNA, 18 nt, synthetic construct
  source 1..18: mol_type = other RNA; note = Antisense oligonucleotide
  modified_base 2: mod_base = OTHER; note = thymine
  modified_base 4: mod_base = OTHER; note = thymine
  modified_base 5: mod_base = OTHER; note = thymine
  modified_base 6: mod_base = OTHER; note = thymine
  modified_base 9: mod_base = OTHER; note = thymine
  modified_base 12: mod_base = OTHER; note = thymine
  modified_base 17: mod_base = OTHER; note = thymine
  modified_base 18: mod_base = OTHER; note = thymine
atctttgatactaacctt

SEQ ID NO: 54 - RNA, 18 nt, synthetic construct
  source 1..18: mol_type = other RNA; note = Antisense oligonucleotide
  modified_base 5: mod_base = OTHER; note = thymine
  modified_base 7: mod_base = OTHER; note = thymine
  modified_base 9: mod_base = OTHER; note = thymine
  modified_base 10: mod_base = OTHER; note = thymine
  modified_base 11: mod_base = OTHER; note = thymine
  modified_base 14: mod_base = OTHER; note = thymine
  modified_base 17: mod_base = OTHER; note = thymine
aaggtatctttgatacta

SEQ ID NO: 55 - RNA, 18 nt, synthetic construct
  source 1..18: mol_type = other RNA; note = Antisense oligonucleotide
  modified_base 1: mod_base = OTHER; note = thymine
  modified_base 2: mod_base = OTHER; note = thymine
  modified_base 10: mod_base = OTHER; note = thymine
  modified_base 12: mod_base = OTHER; note = thymine
  modified_base 14: mod_base = OTHER; note = thymine
  modified_base 15: mod_base = OTHER; note = thymine
  modified_base 16: mod_base = OTHER; note = thymine
ttaaaaaggtatctttga

SEQ ID NO: 56 - RNA, 18 nt, synthetic construct
  source 1..18: mol_type = other RNA; note = Antisense oligonucleotide
  modified_base 1: mod_base = OTHER; note = thymine
  modified_base 2: mod_base = OTHER; note = thymine
  modified_base 4: mod_base = OTHER; note = thymine
  modified_base 5: mod_base = OTHER; note = thymine
  modified_base 6: mod_base = OTHER; note = thymine
  modified_base 7: mod_base = OTHER; note = thymine
  modified_base 15: mod_base = OTHER; note = thymine
  modified_base 17: mod_base = OTHER; note = thymine
ttattttaaaaaggtatc

SEQ ID NO: 57 - RNA, 18 nt, synthetic construct
  source 1..18: mol_type = other RNA; note = Antisense oligonucleotide
  modified_base 2: mod_base = OTHER; note = thymine
  modified_base 4: mod_base = OTHER; note = thymine
  modified_base 5: mod_base = OTHER; note = thymine
  modified_base 6: mod_base = OTHER; note = thymine
  modified_base 7: mod_base = OTHER; note = thymine
  modified_base 9: mod_base = OTHER; note = thymine
  modified_base 10: mod_base = OTHER; note = thymine
  modified_base 11: mod_base = OTHER; note = thymine
  modified_base 12: mod_base = OTHER; note = thymine
gtattttattttaaaaag

SEQ ID NO: 58 - RNA, 18 nt, synthetic construct
  source 1..18: mol_type = other RNA; note = Antisense oligonucleotide
  modified_base 7: mod_base = OTHER; note = thymine
  modified_base 9: mod_base = OTHER; note = thymine
  modified_base 10: mod_base = OTHER; note = thymine
  modified_base 11: mod_base = OTHER; note = thymine
  modified_base 12: mod_base = OTHER; note = thymine
  modified_base 14: mod_base = OTHER; note = thymine
  modified_base 15: mod_base = OTHER; note = thymine
  modified_base 16: mod_base = OTHER; note = thymine
  modified_base 17: mod_base = OTHER; note = thymine
aaccagtattttatttta

SEQ ID NO: 59 - RNA, 18 nt, synthetic construct
  source 1..18: mol_type = other RNA; note = Antisense oligonucleotide
  modified_base 3: mod_base = OTHER; note = thymine
  modified_base 5: mod_base = OTHER; note = thymine
  modified_base 12: mod_base = OTHER; note = thymine
  modified_base 14: mod_base = OTHER; note = thymine
  modified_base 15: mod_base = OTHER; note = thymine
  modified_base 16: mod_base = OTHER; note = thymine
  modified_base 17: mod_base = OTHER; note = thymine
aatgtaaccagtatttta

SEQ ID NO: 60 - RNA, 18 nt, synthetic construct
  source 1..18: mol_type = other RNA; note = Antisense oligonucleotide
  modified_base 1: mod_base = OTHER; note = thymine
  modified_base 3: mod_base = OTHER; note = thymine
  modified_base 8: mod_base = OTHER; note = thymine
  modified_base 10: mod_base = OTHER; note = thymine
  modified_base 17: mod_base = OTHER; note = thymine
tatcaaatgtaaccagta

SEQ ID NO: 61 - RNA, 18 nt, synthetic construct
  source 1..18: mol_type = other RNA; note = Antisense oligonucleotide
  modified_base 1: mod_base = OTHER; note = thymine
  modified_base 4: mod_base = OTHER; note = thymine
  modified_base 5: mod_base = OTHER; note = thymine
  modified_base 7: mod_base = OTHER; note = thymine
  modified_base 11: mod_base = OTHER; note = thymine
  modified_base 12: mod_base = OTHER; note = thymine
  modified_base 14: mod_base = OTHER; note = thymine
  modified_base 15: mod_base = OTHER; note = thymine
  modified_base 16: mod_base = OTHER; note = thymine
tgattctgaattctttca

SEQ ID NO: 62 - RNA, 18 nt, synthetic construct
  source 1..18: mol_type = other RNA; note = Antisense oligonucleotide
  modified_base 2: mod_base = OTHER; note = thymine
  modified_base 5: mod_base = OTHER; note = thymine
  modified_base 6: mod_base = OTHER; note = thymine
  modified_base 8: mod_base = OTHER; note = thymine
  modified_base 12: mod_base = OTHER; note = thymine
  modified_base 13: mod_base = OTHER; note = thymine
  modified_base 15: mod_base = OTHER; note = thymine
  modified_base 16: mod_base = OTHER; note = thymine
  modified_base 17: mod_base = OTHER; note = thymine
ctgattctgaattctttc

SEQ ID NO: 63 - RNA, 18 nt, synthetic construct
  source 1..18: mol_type = other RNA; note = Antisense oligonucleotide
  modified_base 3: mod_base = OTHER; note = thymine
  modified_base 6: mod_base = OTHER; note = thymine
  modified_base 7: mod_base = OTHER; note = thymine
  modified_base 9: mod_base = OTHER; note = thymine
  modified_base 13: mod_base = OTHER; note = thymine
  modified_base 14: mod_base = OTHER; note = thymine
  modified_base 16: mod_base = OTHER; note = thymine
  modified_base 17: mod_base = OTHER; note = thymine
  modified_base 18: mod_base = OTHER; note = thymine
actgattctgaattcttt

SEQ ID NO: 64 - RNA, 18 nt, synthetic construct
  source 1..18: mol_type = other RNA; note = Antisense oligonucleotide
  modified_base 5: mod_base = OTHER; note = thymine
  modified_base 8: mod_base = OTHER; note = thymine
  modified_base 9: mod_base = OTHER; note = thymine
  modified_base 11: mod_base = OTHER; note = thymine
  modified_base 15: mod_base = OTHER; note = thymine
  modified_base 16: mod_base = OTHER; note = thymine
  modified_base 18: mod_base = OTHER; note = thymine
ccactgattctgaattct

SEQ ID NO: 65 - RNA, 18 nt, synthetic construct
  source 1..18: mol_type = other RNA; note = Antisense oligonucleotide
  modified_base 6: mod_base = OTHER; note = thymine
  modified_base 9: mod_base = OTHER; note = thymine
  modified_base 10: mod_base = OTHER; note = thymine
  modified_base 12: mod_base = OTHER; note = thymine
  modified_base 16: mod_base = OTHER; note = thymine
  modified_base 17: mod_base = OTHER; note = thymine
cccactgattctgaattc

SEQ ID NO: 66 - RNA, 18 nt, synthetic construct
  source 1..18: mol_type = other RNA; note = Antisense oligonucleotide
  modified_base 1: mod_base = OTHER; note = thymine
  modified_base 7: mod_base = OTHER; note = thymine
  modified_base 10: mod_base = OTHER; note = thymine
  modified_base 11: mod_base = OTHER; note = thymine
  modified_base 13: mod_base = OTHER; note = thymine
  modified_base 17: mod_base = OTHER; note = thymine
  modified_base 18: mod_base = OTHER; note = thymine
tcccactgattctgaatt

SEQ ID NO: 67 - RNA, 18 nt, synthetic construct
  source 1..18: mol_type = other RNA; note = Antisense oligonucleotide
  modified_base 2: mod_base = OTHER; note = thymine
  modified_base 8: mod_base = OTHER; note = thymine
  modified_base 11: mod_base = OTHER; note = thymine
  modified_base 12: mod_base = OTHER; note = thymine
  modified_base 14: mod_base = OTHER; note = thymine
  modified_base 18: mod_base = OTHER; note = thymine
atcccactgattctgaat

SEQ ID NO: 68 - RNA, 18 nt, synthetic construct
  source 1..18: mol_type = other RNA; note = Antisense oligonucleotide
  modified_base 1: mod_base = OTHER; note = thymine
  modified_base 4: mod_base = OTHER; note = thymine
  modified_base 10: mod_base = OTHER; note = thymine
  modified_base 13: mod_base = OTHER; note = thymine
  modified_base 14: mod_base = OTHER; note = thymine
  modified_base 16: mod_base = OTHER; note = thymine
tcatcccactgattctga

SEQ ID NO: 69 - RNA, 18 nt, synthetic construct
  source 1..18: mol_type = other RNA; note = Antisense oligonucleotide
  modified_base 1: mod_base = OTHER; note = thymine
  modified_base 2: mod_base = OTHER; note = thymine
  modified_base 5: mod_base = OTHER; note = thymine
  modified_base 11: mod_base = OTHER; note = thymine
  modified_base 14: mod_base = OTHER; note = thymine
  modified_base 15: mod_base = OTHER; note = thymine
  modified_base 17: mod_base = OTHER; note = thymine
ttcatcccactgattctg

SEQ ID NO: 70 - RNA, 18 nt, synthetic construct
  source 1..18: mol_type = other RNA; note = Antisense oligonucleotide
  modified_base 2: mod_base = OTHER; note = thymine
  modified_base 3: mod_base = OTHER; note = thymine
  modified_base 6: mod_base = OTHER; note = thymine
  modified_base 12: mod_base = OTHER; note = thymine
  modified_base 15: mod_base = OTHER; note = thymine
  modified_base 16: mod_base = OTHER; note = thymine
  modified_base 18: mod_base = OTHER; note = thymine
cttcatcccactgattct

SEQ ID NO: 71 - RNA, 18 nt, synthetic construct
  source 1..18: mol_type = other RNA; note = Antisense oligonucleotide
  modified_base 3: mod_base = OTHER; note = thymine
  modified_base 4: mod_base = OTHER; note = thymine
  modified_base 7: mod_base = OTHER; note = thymine
  modified_base 13: mod_base = OTHER; note = thymine
  modified_base 16: mod_base = OTHER; note = thymine
  modified_base 17: mod_base = OTHER; note = thymine
acttcatcccactgattc

SEQ ID NO: 72 - RNA, 18 nt, synthetic construct
  source 1..18: mol_type = other RNA; note = Antisense oligonucleotide
  modified_base 2: mod_base = OTHER; note = thymine
  modified_base 5: mod_base = OTHER; note = thymine
  modified_base 6: mod_base = OTHER; note = thymine
  modified_base 9: mod_base = OTHER; note = thymine
  modified_base 15: mod_base = OTHER; note = thymine
  modified_base 18: mod_base = OTHER; note = thymine
gtacttcatcccactgat

SEQ ID NO: 73 - RNA, 18 nt, synthetic construct
  source 1..18: mol_type = other RNA; note = Antisense oligonucleotide
  modified_base 1: mod_base = OTHER; note = thymine
  modified_base 3: mod_base = OTHER; note = thymine
  modified_base 6: mod_base = OTHER; note = thymine
  modified_base 7: mod_base = OTHER; note = thymine
  modified_base 10: mod_base = OTHER; note = thymine
  modified_base 16: mod_base = OTHER; note = thymine
tgtacttcatcccactga

SEQ ID NO: 74 - RNA, 18 nt, synthetic construct
  source 1..18: mol_type = other RNA; note = Antisense oligonucleotide
  modified_base 1: mod_base = OTHER; note = thymine
  modified_base 2: mod_base = OTHER; note = thymine
  modified_base 4: mod_base = OTHER; note = thymine
  modified_base 7: mod_base = OTHER; note = thymine
  modified_base 8: mod_base = OTHER; note = thymine
  modified_base 11: mod_base = OTHER; note = thymine
  modified_base 17: mod_base = OTHER; note = thymine
ttgtacttcatcccactg

SEQ ID NO: 75 - RNA, 18 nt, synthetic construct
  source 1..18: mol_type = other RNA; note = Antisense oligonucleotide
  modified_base 2: mod_base = OTHER; note = thymine
  modified_base 3: mod_base = OTHER; note = thymine
  modified_base 5: mod_base = OTHER; note = thymine
  modified_base 8: mod_base = OTHER; note = thymine
  modified_base 9: mod_base = OTHER; note = thymine
  modified_base 12: mod_base = OTHER; note = thymine
  modified_base 18: mod_base = OTHER; note = thymine
cttgtacttcatcccact

SEQ ID NO: 76 - RNA, 18 nt, synthetic construct
  source 1..18: mol_type = other RNA; note = Antisense oligonucleotide
  modified_base 1: mod_base = OTHER; note = thymine
  modified_base 2: mod_base = OTHER; note = thymine
  modified_base 4: mod_base = OTHER; note = thymine
  modified_base 5: mod_base = OTHER; note = thymine
  modified_base 7: mod_base = OTHER; note = thymine
  modified_base 10: mod_base = OTHER; note = thymine
  modified_base 11: mod_base = OTHER; note = thymine
  modified_base 14: mod_base = OTHER; note = thymine
ttcttgtacttcatccca

SEQ ID NO: 77 - RNA, 18 nt, synthetic construct
  source 1..18: mol_type = other RNA; note = Antisense oligonucleotide
  modified_base 2: mod_base = OTHER; note = thymine
  modified_base 3: mod_base = OTHER; note = thymine
  modified_base 5: mod_base = OTHER; note = thymine
  modified_base 6: mod_base = OTHER; note = thymine
  modified_base 8: mod_base = OTHER; note = thymine
  modified_base 11: mod_base = OTHER; note = thymine
  modified_base 12: mod_base = OTHER; note = thymine
  modified_base 15: mod_base = OTHER; note = thymine
gttcttgtacttcatccc

SEQ ID NO: 78 - RNA, 18 nt, synthetic construct
  source 1..18: mol_type = other RNA; note = Antisense oligonucleotide
  modified_base 1: mod_base = OTHER; note = thymine
  modified_base 3: mod_base = OTHER; note = thymine
  modified_base 4: mod_base = OTHER; note = thymine
  modified_base 6: mod_base = OTHER; note = thymine
  modified_base 7: mod_base = OTHER; note = thymine
  modified_base 9: mod_base = OTHER; note = thymine
  modified_base 12: mod_base = OTHER; note = thymine
  modified_base 13: mod_base = OTHER; note = thymine
  modified_base 16: mod_base = OTHER; note = thymine
tgttcttgtacttcatcc

SEQ ID NO: 79 - RNA, 18 nt, synthetic construct
  source 1..18: mol_type = other RNA; note = Antisense oligonucleotide
  modified_base 2: mod_base = OTHER; note = thymine
  modified_base 4: mod_base = OTHER; note = thymine
  modified_base 5: mod_base = OTHER; note = thymine
  modified_base 7: mod_base = OTHER; note = thymine
  modified_base 8: mod_base = OTHER; note = thymine
  modified_base 10: mod_base = OTHER; note = thymine
  modified_base 13: mod_base = OTHER; note = thymine
  modified_base 14: mod_base = OTHER; note = thymine
  modified_base 17: mod_base = OTHER; note = thymine
gtgttcttgtacttcatc

SEQ ID NO: 80 - RNA, 18 nt, synthetic construct
  source 1..18: mol_type = other RNA; note = Antisense oligonucleotide
  modified_base 4: mod_base = OTHER; note = thymine
  modified_base 6: mod_base = OTHER; note = thymine
  modified_base 7: mod_base = OTHER; note = thymine
  modified_base 9: mod_base = OTHER; note = thymine
  modified_base 10: mod_base = OTHER; note = thymine
  modified_base 12: mod_base = OTHER; note = thymine
  modified_base 15: mod_base = OTHER; note = thymine
  modified_base 16: mod_base = OTHER; note = thymine
aggtgttcttgtacttca

SEQ ID NO: 81 - RNA, 18 nt, synthetic construct
  source 1..18: mol_type = other RNA; note = Antisense oligonucleotide
  modified_base 5: mod_base = OTHER; note = thymine
  modified_base 7: mod_base = OTHER; note = thymine
  modified_base 8: mod_base = OTHER; note = thymine
  modified_base 10: mod_base = OTHER; note = thymine
  modified_base 11: mod_base = OTHER; note = thymine
  modified_base 13: mod_base = OTHER; note = thymine
  modified_base 16: mod_base = OTHER; note = thymine
  modified_base 17: mod_base = OTHER; note = thymine
aaggtgttcttgtacttc

SEQ ID NO: 82 - RNA, 18 nt, synthetic construct
  source 1..18: mol_type = other RNA; note = Antisense oligonucleotide
  modified_base 6: mod_base = OTHER; note = thymine
  modified_base 8: mod_base = OTHER; note = thymine
  modified_base 9: mod_base = OTHER; note = thymine
  modified_base 11: mod_base = OTHER; note = thymine
  modified_base 12: mod_base = OTHER; note = thymine
  modified_base 14: mod_base = OTHER; note = thymine
  modified_base 17: mod_base = OTHER; note = thymine
  modified_base 18: mod_base = OTHER; note = thymine
gaaggtgttcttgtactt

SEQ ID NO: 83 - RNA, 18 nt, synthetic construct
  source 1..18: mol_type = other RNA; note = Antisense oligonucleotide
  modified_base 1: mod_base = OTHER; note = thymine
  modified_base 7: mod_base = OTHER; note = thymine
  modified_base 9: mod_base = OTHER; note = thymine
  modified_base 10: mod_base = OTHER; note = thymine
  modified_base 12: mod_base = OTHER; note = thymine
  modified_base 13: mod_base = OTHER; note = thymine
  modified_base 15: mod_base = OTHER; note = thymine
  modified_base 18: mod_base = OTHER; note = thymine
tgaaggtgttcttgtact

SEQ ID NO: 84 - RNA, 18 nt, synthetic construct
  source 1..18: mol_type = other RNA; note = Antisense oligonucleotide
  modified_base 1: mod_base = OTHER; note = thymine
  modified_base 3: mod_base = OTHER; note = thymine
  modified_base 9: mod_base = OTHER; note = thymine
  modified_base 11: mod_base = OTHER; note = thymine
  modified_base 12: mod_base = OTHER; note = thymine
  modified_base 14: mod_base = OTHER; note = thymine
  modified_base 15: mod_base = OTHER; note = thymine
  modified_base 17: mod_base = OTHER; note = thymine
tctgaaggtgttcttgta

SEQ ID NO: 85 - RNA, 18 nt, synthetic construct
  source 1..18: mol_type = other RNA; note = Antisense oligonucleotide
  modified_base 1: mod_base = OTHER; note = thymine
  modified_base 2: mod_base = OTHER; note = thymine
  modified_base 4: mod_base = OTHER; note = thymine
  modified_base 10: mod_base = OTHER; note = thymine
  modified_base 12: mod_base = OTHER; note = thymine
  modified_base 13: mod_base = OTHER; note = thymine
  modified_base 15: mod_base = OTHER; note = thymine
  modified_base 16: mod_base = OTHER; note = thymine
  modified_base 18: mod_base = OTHER; note = thymine
ttctgaaggtgttcttgt

SEQ ID NO: 86 - RNA, 18 nt, synthetic construct
  source 1..18: mol_type = other RNA; note = Antisense oligonucleotide
  modified_base 2: mod_base = OTHER; note = thymine
  modified_base 3: mod_base = OTHER; note = thymine
  modified_base 5: mod_base = OTHER; note = thymine
  modified_base 11: mod_base = OTHER; note = thymine
  modified_base 13: mod_base = OTHER; note = thymine
  modified_base 14: mod_base = OTHER; note = thymine
  modified_base 16: mod_base = OTHER; note = thymine
  modified_base 17: mod_base = OTHER; note = thymine
gttctgaaggtgttcttg

SEQ ID NO: 87 - RNA, 18 nt, synthetic construct
  source 1..18: mol_type = other RNA; note = Antisense oligonucleotide
  modified_base 3: mod_base = OTHER; note = thymine
  modified_base 4: mod_base = OTHER; note = thymine
  modified_base 6: mod_base = OTHER; note = thymine
  modified_base 12: mod_base = OTHER; note = thymine
  modified_base 14: mod_base = OTHER; note = thymine
  modified_base 15: mod_base = OTHER; note = thymine
  modified_base 17: mod_base = OTHER; note = thymine
  modified_base 18: mod_base = OTHER; note = thymine
ggttctgaaggtgttctt

SEQ ID NO: 88 - RNA, 18 nt, synthetic construct
  source 1..18: mol_type = other RNA; note = Antisense oligonucleotide
  modified_base 5: mod_base = OTHER; note = thymine
  modified_base 6: mod_base = OTHER; note = thymine
  modified_base 8: mod_base = OTHER; note = thymine
  modified_base 14: mod_base = OTHER; note = thymine
  modified_base 16: mod_base = OTHER; note = thymine
  modified_base 17: mod_base = OTHER; note = thymine
ccggttctgaaggtgttc

SEQ ID NO: 89 - RNA, 18 nt, synthetic construct
  source 1..18: mol_type = other RNA; note = Antisense oligonucleotide
  modified_base 1: mod_base = OTHER; note = thymine
  modified_base 6: mod_base = OTHER; note = thymine
  modified_base 7: mod_base = OTHER; note = thymine
  modified_base 9: mod_base = OTHER; note = thymine
  modified_base 15: mod_base = OTHER; note = thymine
  modified_base 17: mod_base = OTHER; note = thymine
  modified_base 18: mod_base = OTHER; note = thymine
tccggttctgaaggtgtt

SEQ ID NO: 90 - RNA, 18 nt, synthetic construct
  source 1..18: mol_type = other RNA; note = Antisense oligonucleotide
  modified_base 2: mod_base = OTHER; note = thymine
  modified_base 7: mod_base = OTHER; note = thymine
  modified_base 8: mod_base = OTHER; note = thymine
  modified_base 10: mod_base = OTHER; note = thymine
  modified_base 16: mod_base = OTHER; note = thymine
  modified_base 18: mod_base = OTHER; note = thymine
ctccggttctgaaggtgt

SEQ ID NO: 91 - RNA, 18 nt, synthetic construct
  source 1..18: mol_type = other RNA; note = Antisense oligonucleotide
  modified_base 3: mod_base = OTHER; note = thymine
  modified_base 8: mod_base = OTHER; note = thymine
  modified_base 9: mod_base = OTHER; note = thymine
  modified_base 11: mod_base = OTHER; note = thymine
  modified_base 17: mod_base = OTHER; note = thymine
cctccggttctgaaggtg

SEQ ID NO: 92 - RNA, 18 nt, synthetic construct
  source 1..18: mol_type = other RNA; note = Antisense oligonucleotide
  modified_base 1: mod_base = OTHER; note = thymine
  modified_base 5: mod_base = OTHER; note = thymine
  modified_base 10: mod_base = OTHER; note = thymine
  modified_base 11: mod_base = OTHER; note = thymine
  modified_base 13: mod_base = OTHER; note = thymine
tgcctccggttctgaagg

SEQ ID NO: 93 - RNA, 18 nt, synthetic construct
  source 1..18: mol_type = other RNA; note = Antisense oligonucleotide
  modified_base 1: mod_base = OTHER; note = thymine
  modified_base 2: mod_base = OTHER; note = thymine
  modified_base 6: mod_base = OTHER; note = thymine
  modified_base 11: mod_base = OTHER; note = thymine
  modified_base 12: mod_base = OTHER; note = thymine
  modified_base 14: mod_base = OTHER; note = thymine
ttgcctccggttctgaag

SEQ ID NO: 94 - RNA, 18 nt, synthetic construct
  source 1..18: mol_type = other RNA; note = Antisense oligonucleotide
  modified_base 2: mod_base = OTHER; note = thymine
  modified_base 3: mod_base = OTHER; note = thymine
  modified_base 7: mod_base = OTHER; note = thymine
  modified_base 12: mod_base = OTHER; note = thymine
  modified_base 13: mod_base = OTHER; note = thymine
  modified_base 15: mod_base = OTHER; note = thymine
gttgcctccggttctgaa

SEQ ID NO: 95 - RNA, 18 nt, synthetic construct
  source 1..18: mol_type = other RNA; note = Antisense oligonucleotide
  modified_base 1: mod_base = OTHER; note = thymine
  modified_base 3: mod_base = OTHER; note = thymine
  modified_base 4: mod_base = OTHER; note = thymine
  modified_base 8: mod_base = OTHER; note = thymine
  modified_base 13: mod_base = OTHER; note = thymine
  modified_base 14: mod_base = OTHER; note = thymine
  modified_base 16: mod_base = OTHER; note = thymine
tgttgcctccggttctga

SEQ ID NO: 96 - RNA, 18 nt, synthetic construct
  source 1..18: mol_type = other RNA; note = Antisense oligonucleotide
  modified_base 3: mod_base = OTHER; note = thymine
  modified_base 5: mod_base = OTHER; note = thymine
  modified_base 6: mod_base = OTHER; note = thymine
  modified_base 10: mod_base = OTHER; note = thymine
  modified_base 15: mod_base = OTHER; note = thymine
  modified_base 16: mod_base = OTHER; note = thymine
  modified_base 18: mod_base = OTHER; note = thymine
actgttgcctccggttct

SEQ ID NO: 97 - RNA, 18 nt, synthetic construct
  source 1..18: mol_type = other RNA; note = Antisense oligonucleotide
  modified_base 4: mod_base = OTHER; note = thymine
  modified_base 6: mod_base = OTHER; note = thymine
  modified_base 7: mod_base = OTHER; note = thymine
  modified_base 11: mod_base = OTHER; note = thymine
  modified_base 16: mod_base = OTHER; note = thymine
  modified_base 17: mod_base = OTHER; note = thymine
aactgttgcctccggttc

SEQ ID NO: 98 - RNA, 18 nt, synthetic construct
  source 1..18: mol_type = other RNA; note = Antisense oligonucleotide
  modified_base 5: mod_base = OTHER; note = thymine
  modified_base 7: mod_base = OTHER; note = thymine
  modified_base 8: mod_base = OTHER; note = thymine
  modified_base 12: mod_base = OTHER; note = thymine
  modified_base 17: mod_base = OTHER; note = thymine
  modified_base 18: mod_base = OTHER; note = thymine
caactgttgcctccggtt

SEQ ID NO: 99 - RNA, 18 nt, synthetic construct
  source 1..18: mol_type = other RNA; note = Antisense oligonucleotide
  modified_base 1: mod_base = OTHER; note = thymine
  modified_base 6: mod_base = OTHER; note = thymine
  modified_base 8: mod_base = OTHER; note = thymine
  modified_base 9: mod_base = OTHER; note = thymine
  modified_base 13: mod_base = OTHER; note = thymine
  modified_base 18: mod_base = OTHER; note = thymine
tcaactgttgcctccggt

SEQ ID NO: 100 - RNA, 18 nt, synthetic construct
  source 1..18: mol_type = other RNA; note = Antisense oligonucleotide
  modified_base 2: mod_base = OTHER; note = thymine
  modified_base 3: mod_base = OTHER; note = thymine
  modified_base 8: mod_base = OTHER; note = thymine
  modified_base 10: mod_base = OTHER; note = thymine
  modified_base 11: mod_base = OTHER; note = thymine
  modified_base 15: mod_base = OTHER; note = thymine
attcaactgttgcctccg

SEQ ID NO: 101 - RNA, 18 nt, synthetic construct
  source 1..18: mol_type = other RNA; note = Antisense oligonucleotide
  modified_base 3: mod_base = OTHER; note = thymine
  modified_base 4: mod_base = OTHER; note = thymine
  modified_base 9: mod_base = OTHER; note = thymine
  modified_base 11: mod_base = OTHER; note = thymine
  modified_base 12: mod_base = OTHER; note = thymine
  modified_base 16: mod_base = OTHER; note = thymine
cattcaactgttgcctcc

SEQ ID NO: 102 - RNA, 18 nt, synthetic construct
  source 1..18: mol_type = other RNA; note = Antisense oligonucleotide
  modified_base 1: mod_base = OTHER; note = thymine
  modified_base 4: mod_base = OTHER; note = thymine
  modified_base 5: mod_base = OTHER; note = thymine
  modified_base 10: mod_base = OTHER; note = thymine
  modified_base 12: mod_base = OTHER; note = thymine
  modified_base 13: mod_base = OTHER; note = thymine
  modified_base 17: mod_base = OTHER; note = thymine
tcattcaactgttgcctc

SEQ ID NO: 103 - RNA, 18 nt, synthetic construct
  source 1..18: mol_type = other RNA; note = Antisense oligonucleotide
  modified_base 1: mod_base = OTHER; note = thymine
  modified_base 2: mod_base = OTHER; note = thymine
  modified_base 5: mod_base = OTHER; note = thymine
  modified_base 6: mod_base = OTHER; note = thymine
  modified_base 11: mod_base = OTHER; note = thymine
  modified_base 13: mod_base = OTHER; note = thymine
  modified_base 14: mod_base = OTHER; note = thymine
  modified_base 18: mod_base = OTHER; note = thymine
ttcattcaactgttgcct

SEQ ID NO: 104 - RNA, 18 nt, synthetic construct
  source 1..18: mol_type = other RNA; note = Antisense oligonucleotide
  modified_base 2: mod_base = OTHER; note = thymine
  modified_base 3: mod_base = OTHER; note = thymine
  modified_base 4: mod_base = OTHER; note = thymine
  modified_base 7: mod_base = OTHER; note = thymine
  modified_base 8: mod_base = OTHER; note = thymine
  modified_base 13: mod_base = OTHER; note = thymine
  modified_base 15: mod_base = OTHER; note = thymine
  modified_base 16: mod_base = OTHER; note = thymine
atttcattcaactgttgc

SEQ ID NO: 105 - RNA, 18 nt, synthetic construct
  source 1..18: mol_type = other RNA; note = Antisense oligonucleotide
  modified_base 3: mod_base = OTHER; note = thymine
  modified_base 4: mod_base = OTHER; note = thymine
  modified_base 5: mod_base = OTHER; note = thymine
  modified_base 8: mod_base = OTHER; note = thymine
  modified_base 9: mod_base = OTHER; note = thymine
  modified_base 14: mod_base = OTHER; note = thymine
  modified_base 16: mod_base = OTHER; note = thymine
  modified_base 17: mod_base = OTHER; note = thymine
catttcattcaactgttg

SEQ ID NO: 106 - RNA, 18 nt, synthetic construct
  source 1..18: mol_type = other RNA; note = Antisense oligonucleotide
  modified_base 4: mod_base = OTHER; note = thymine
  modified_base 5: mod_base = OTHER; note = thymine
  modified_base 6: mod_base = OTHER; note = thymine
  modified_base 9: mod_base = OTHER; note = thymine
  modified_base 10: mod_base = OTHER; note = thymine
  modified_base 15: mod_base = OTHER; note = thymine
  modified_base 17: mod_base = OTHER; note = thymine
  modified_base 18: mod_base = OTHER; note = thymine
acatttcattcaactgtt

SEQ ID NO: 107 - RNA, 14 nt, synthetic construct
  source 1..14: mol_type = other RNA; note = Antisense oligonucleotide
  modified_base 3: mod_base = OTHER; note = thymine
  modified_base 5: mod_base = OTHER; note = thymine
  modified_base 6: mod_base = OTHER; note = thymine
  modified_base 8: mod_base = OTHER; note = thymine
  modified_base 9: mod_base = OTHER; note = thymine
  modified_base 11: mod_base = OTHER; note = thymine
  modified_base 14: mod_base = OTHER; note = thymine
ggtgttcttgtact

SEQ ID NO: 108 - RNA, 14 nt, synthetic construct
  source 1..14: mol_type = other RNA; note = Antisense oligonucleotide
  modified_base 1: mod_base = OTHER; note = thymine
  modified_base 2: mod_base = OTHER; note = thymine
  modified_base 4: mod_base = OTHER; note = thymine
  modified_base 5: mod_base = OTHER; note = thymine
  modified_base 7: mod_base = OTHER; note = thymine
  modified_base 10: mod_base = OTHER; note = thymine
  modified_base 11: mod_base = OTHER; note = thymine
  modified_base 14: mod_base = OTHER; note = thymine
ttcttgtacttcat

SEQ ID NO: 109 - RNA, 14 nt, synthetic construct
  source 1..14: mol_type = other RNA; note = Antisense oligonucleotide
  modified_base 1: mod_base = OTHER; note = thymine
  modified_base 3: mod_base = OTHER; note = thymine
  modified_base 4: mod_base = OTHER; note = thymine
  modified_base 6: mod_base = OTHER; note = thymine
  modified_base 7: mod_base = OTHER; note = thymine
  modified_base 9: mod_base = OTHER; note = thymine
  modified_base 12: mod_base = OTHER; note = thymine
  modified_base 13: mod_base = OTHER; note = thymine
tgttcttgtacttc

SEQ ID NO: 110 - RNA, 16 nt, synthetic construct
  source 1..16: mol_type = other RNA; note = Antisense oligonucleotide
  modified_base 3: mod_base = OTHER; note = thymine
  modified_base 5: mod_base = OTHER; note = thymine
  modified_base 6: mod_base = OTHER; note = thymine
  modified_base 8: mod_base = OTHER; note = thymine
  modified_base 9: mod_base = OTHER; note = thymine
  modified_base 11: mod_base = OTHER; note = thymine
  modified_base 14: mod_base = OTHER; note = thymine
  modified_base 15: mod_base = OTHER; note = thymine
ggtgttcttgtacttc

SEQ ID NO: 111 - RNA, 16 nt, synthetic construct
  source 1..16: mol_type = other RNA; note = Antisense oligonucleotide
  modified_base 1: mod_base = OTHER; note = thymine
  modified_base 3: mod_base = OTHER; note = thymine
  modified_base 4: mod_base = OTHER; note = thymine
  modified_base 6: mod_base = OTHER; note = thymine
  modified_base 7: mod_base = OTHER; note = thymine
  modified_base 9: mod_base = OTHER; note = thymine
  modified_base 12: mod_base = OTHER; note = thymine
  modified_base 13: mod_base = OTHER; note = thymine
  modified_base 16: mod_base = OTHER; note = thymine
tgttcttgtacttcat

SEQ ID NO: 112 - RNA, 16 nt, synthetic construct
  source 1..16: mol_type = other RNA; note = Antisense oligonucleotide
  modified_base 2: mod_base = OTHER; note = thymine
  modified_base 4: mod_base = OTHER; note = thymine
  modified_base 5: mod_base = OTHER; note = thymine
  modified_base 7: mod_base = OTHER; note = thymine
  modified_base 8: mod_base = OTHER; note = thymine
  modified_base 10: mod_base = OTHER; note = thymine
  modified_base 13: mod_base = OTHER; note = thymine
  modified_base 14: mod_base = OTHER; note = thymine
gtgttcttgtacttca

SEQ ID NO: 113 - RNA, 20 nt, synthetic construct
  source 1..20: mol_type = other RNA; note = Antisense oligonucleotide
  modified_base 3: mod_base = OTHER; note = thymine
  modified_base 5: mod_base = OTHER; note = thymine
  modified_base 6: mod_base = OTHER; note = thymine
  modified_base 8: mod_base = OTHER; note = thymine
  modified_base 9: mod_base = OTHER; note = thymine
  modified_base 11: mod_base = OTHER; note = thymine
  modified_base 14: mod_base = OTHER; note = thymine
  modified_base 15: mod_base = OTHER; note = thymine
  modified_base 18: mod_base = OTHER; note = thymine
ggtgttcttgtacttcatcc

SEQ ID NO: 114 - RNA, 20 nt, synthetic construct
  source 1..20: mol_type = other RNA; note = Antisense oligonucleotide
  modified_base 5: mod_base = OTHER; note = thymine
  modified_base 7: mod_base = OTHER; note = thymine
  modified_base 8: mod_base = OTHER; note = thymine
  modified_base 10: mod_base = OTHER; note = thymine
  modified_base 11: mod_base = OTHER; note = thymine
  modified_base 13: mod_base = OTHER; note = thymine
  modified_base 16: mod_base = OTHER; note = thymine
  modified_base 17: mod_base = OTHER; note = thymine
  modified_base 20: mod_base = OTHER; note = thymine
aaggtgttcttgtacttcat

SEQ ID NO: 115 - RNA, 20 nt, synthetic construct
  source 1..20: mol_type = other RNA; note = Antisense oligonucleotide
  modified_base 4: mod_base = OTHER; note = thymine
  modified_base 6: mod_base = OTHER; note = thymine
  modified_base 7: mod_base = OTHER; note = thymine
  modified_base 9: mod_base = OTHER; note = thymine
  modified_base 10: mod_base = OTHER; note = thymine
  modified_base 12: mod_base = OTHER; note = thymine
  modified_base 15: mod_base = OTHER; note = thymine
  modified_base 16: mod_base = OTHER; note = thymine
  modified_base 19: mod_base = OTHER; note = thymine
aggtgttcttgtacttcatc

SEQ ID NO: 116 - RNA, 18 nt, synthetic construct
  source 1..18: mol_type = other RNA; note = Antisense oligonucleotide
  modified_base 5: mod_base = OTHER; note = thymine
  modified_base 6: mod_base = OTHER; note = thymine
  modified_base 7: mod_base = OTHER; note = thymine
  modified_base 10: mod_base = OTHER; note = thymine
  modified_base 11: mod_base = OTHER; note = thymine
  modified_base 16: mod_base = OTHER; note = thymine
  modified_base 18: mod_base = OTHER; note = thymine
aacatttcattcaactgt

SEQ ID NO: 117 - RNA, 18 nt, synthetic construct
  source 1..18: mol_type = other RNA; note = Antisense oligonucleotide
  modified_base 1: mod_base = OTHER; note = thymine
  modified_base 2: mod_base = OTHER; note = thymine
  modified_base 7: mod_base = OTHER; note = thymine
  modified_base 8: mod_base = OTHER; note = thymine
  modified_base 9: mod_base = OTHER; note = thymine
  modified_base 12: mod_base = OTHER; note = thymine
  modified_base 13: mod_base = OTHER; note = thymine
  modified_base 18: mod_base = OTHER; note = thymine
ttaacatttcattcaact

SEQ ID NO: 118 - RNA, 18 nt, synthetic construct
  source 1..18: mol_type = other RNA; note = Antisense oligonucleotide
  modified_base 1: mod_base = OTHER; note = thymine
  modified_base 2: mod_base = OTHER; note = thymine
  modified_base 3: mod_base = OTHER; note = thymine
  modified_base 8: mod_base = OTHER; note = thymine
  modified_base 9: mod_base = OTHER; note = thymine
  modified_base 10: mod_base = OTHER; note = thymine
  modified_base 13: mod_base = OTHER; note = thymine
  modified_base 14: mod_base = OTHER; note = thymine
tttaacatttcattcaac

SEQ ID NO: 119 - RNA, 18 nt, synthetic construct
  source 1..18: mol_type = other RNA; note = Antisense oligonucleotide
  modified_base 2: mod_base = OTHER; note = thymine
  modified_base 3: mod_base = OTHER; note = thymine
  modified_base 4: mod_base = OTHER; note = thymine
  modified_base 9: mod_base = OTHER; note = thymine
  modified_base 10: mod_base = OTHER; note = thymine
  modified_base 11: mod_base = OTHER; note = thymine
  modified_base 14: mod_base = OTHER; note = thymine
  modified_base 15: mod_base = OTHER; note = thymine
ctttaacatttcattcaa

SEQ ID NO: 120 - RNA, 18 nt, synthetic construct
  source 1..18: mol_type = other RNA; note = Antisense oligonucleotide
  modified_base 3: mod_base = OTHER; note = thymine
  modified_base 4: mod_base = OTHER; note = thymine
  modified_base 5: mod_base = OTHER; note = thymine
  modified_base 10: mod_base = OTHER; note = thymine
  modified_base 11: mod_base = OTHER; note = thymine
  modified_base 12: mod_base = OTHER; note = thymine
  modified_base 15: mod_base = OTHER; note = thymine
  modified_base 16: mod_base = OTHER; note = thymine
cctttaacatttcattca

SEQ ID NO: 121 - RNA, 18 nt, synthetic construct
  source 1..18: mol_type = other RNA; note = Antisense oligonucleotide
  modified_base 2: mod_base = OTHER; note = thymine
  modified_base 3: mod_base = OTHER; note = thymine
  modified_base 5: mod_base = OTHER; note = thymine
  modified_base 7: mod_base = OTHER; note = thymine
  modified_base 8: mod_base = OTHER; note = thymine
  modified_base 12: mod_base = OTHER; note = thymine
  modified_base 15: mod_base = OTHER; note = thymine
  modified_base 16: mod_base = OTHER; note = thymine
  modified_base 17: mod_base = OTHER; note = thymine
attgtgttgaatccttta

SEQ ID NO: 122 - RNA, 18 nt, synthetic construct
  source 1..18: mol_type = other RNA; note = Antisense oligonucleotide
  modified_base 3: mod_base = OTHER; note = thymine
  modified_base 4: mod_base = OTHER; note = thymine
  modified_base 6: mod_base = OTHER; note = thymine
  modified_base 8: mod_base = OTHER; note = thymine
  modified_base 9: mod_base = OTHER; note = thymine
  modified_base 13: mod_base = OTHER; note = thymine
  modified_base 16: mod_base = OTHER; note = thymine
  modified_base 17: mod_base = OTHER; note = thymine
  modified_base 18: mod_base = OTHER; note = thymine
cattgtgttgaatccttt

SEQ ID NO: 123 - RNA, 18 nt, synthetic construct
  source 1..18: mol_type = other RNA; note = Antisense oligonucleotide
  modified_base 4: mod_base = OTHER; note = thymine
  modified_base 5: mod_base = OTHER; note = thymine
  modified_base 7: mod_base = OTHER; note = thymine
  modified_base 9: mod_base = OTHER; note = thymine
  modified_base 10: mod_base = OTHER; note = thymine
  modified_base 14: mod_base = OTHER; note = thymine
  modified_base 17: mod_base = OTHER; note = thymine
  modified_base 18: mod_base = OTHER; note = thymine
ccattgtgttgaatcctt

SEQ ID NO: 124 - RNA, 18 nt, synthetic construct
  source 1..18: mol_type = other RNA; note = Antisense oligonucleotide
  modified_base 5: mod_base = OTHER; note = thymine
  modified_base 6: mod_base = OTHER; note = thymine
  modified_base 8: mod_base = OTHER; note = thymine
  modified_base 10: mod_base = OTHER; note = thymine
  modified_base 11: mod_base = OTHER; note = thymine
  modified_base 15: mod_base = OTHER; note = thymine
  modified_base 18: mod_base = OTHER; note = thymine
gccattgtgttgaatcct

SEQ ID NO: 125 - RNA, 18 nt, synthetic construct
  source 1..18: mol_type = other RNA; note = Antisense oligonucleotide
  modified_base 7: mod_base = OTHER; note = thymine
  modified_base 8: mod_base = OTHER; note = thymine
  modified_base 10: mod_base = OTHER; note = thymine
  modified_base 12: mod_base = OTHER; note = thymine
  modified_base 13: mod_base = OTHER; note = thymine
  modified_base 17: mod_base = OTHER; note = thymine
cagccattgtgttgaatc

SEQ ID NO: 126 - RNA, 18 nt, synthetic construct
  source 1..18: mol_type = other RNA; note = Antisense oligonucleotide
  modified_base 8: mod_base = OTHER; note = thymine
  modified_base 9: mod_base = OTHER; note = thymine
  modified_base 11: mod_base = OTHER; note = thymine
  modified_base 13: mod_base = OTHER; note = thymine
  modified_base 14: mod_base = OTHER; note = thymine
  modified_base 18: mod_base = OTHER; note = thymine
ccagccattgtgttgaat

SEQ ID NO: 127 - RNA, 18 nt, synthetic construct
  source 1..18: mol_type = other RNA; note = Antisense oligonucleotide
  modified_base 1: mod_base = OTHER; note = thymine
  modified_base 9: mod_base = OTHER; note = thymine
  modified_base 10: mod_base = OTHER; note = thymine
  modified_base 12: mod_base = OTHER; note = thymine
  modified_base 14: mod_base = OTHER; note = thymine
  modified_base 15: mod_base = OTHER; note = thymine
tccagccattgtgttgaa

SEQ ID NO: 128 - RNA, 18 nt, synthetic construct
  source 1..18: mol_type = other RNA; note = Antisense oligonucleotide
  modified_base 1: mod_base = OTHER; note = thymine
  modified_base 2: mod_base = OTHER; note = thymine
  modified_base 10: mod_base = OTHER; note = thymine
  modified_base 11: mod_base = OTHER; note = thymine
  modified_base 13: mod_base = OTHER; note = thymine
  modified_base 15: mod_base = OTHER; note = thymine
  modified_base 16: mod_base = OTHER; note = thymine
ttccagccattgtgttga

SEQ ID NO: 129 - RNA, 18 nt, synthetic construct
  source 1..18: mol_type = other RNA; note = Antisense oligonucleotide
  modified_base 3: mod_base = OTHER; note = thymine
  modified_base 4: mod_base = OTHER; note = thymine
  modified_base 12: mod_base = OTHER; note = thymine
  modified_base 13: mod_base = OTHER; note = thymine
  modified_base 15: mod_base = OTHER; note = thymine
  modified_base 17: mod_base = OTHER; note = thymine
  modified_base 18: mod_base = OTHER; note = thymine
gcttccagccattgtgtt

SEQ ID NO: 130 - RNA, 18 nt, synthetic construct
  source 1..18: mol_type = other RNA; note = Antisense oligonucleotide
  modified_base 4: mod_base = OTHER; note = thymine
  modified_base 5: mod_base = OTHER; note = thymine
  modified_base 13: mod_base = OTHER; note = thymine
  modified_base 14: mod_base = OTHER; note = thymine
  modified_base 16: mod_base = OTHER; note = thymine
  modified_base 18: mod_base = OTHER; note = thymine
agcttccagccattgtgt

SEQ ID NO: 131 - RNA, 18 nt, synthetic construct
  source 1..18: mol_type = other RNA; note = Antisense oligonucleotide
  modified_base 1: mod_base = OTHER; note = thymine
  modified_base 5: mod_base = OTHER; note = thymine
  modified_base 6: mod_base = OTHER; note = thymine
  modified_base 14: mod_base = OTHER; note = thymine
  modified_base 15: mod_base = OTHER; note = thymine
  modified_base 17: mod_base = OTHER; note = thymine
tagcttccagccattgtg

SEQ ID NO: 132 - RNA, 18 nt, synthetic construct
  source 1..18: mol_type = other RNA; note = Antisense oligonucleotide
  modified_base 1: mod_base = OTHER; note = thymine
  modified_base 2: mod_base = OTHER; note = thymine
  modified_base 6: mod_base = OTHER; note = thymine
  modified_base 7: mod_base = OTHER; note = thymine
  modified_base 15: mod_base = OTHER; note = thymine
  modified_base 16: mod_base = OTHER; note = thymine
  modified_base 18: mod_base = OTHER; note = thymine
ttagcttccagccattgt

SEQ ID NO: 133 - RNA, 18 nt, synthetic construct
  source 1..18: mol_type = other RNA; note = Antisense oligonucleotide
  modified_base 3: mod_base = OTHER; note = thymine
  modified_base 4: mod_base = OTHER; note = thymine
  modified_base 8: mod_base = OTHER; note = thymine
  modified_base 9: mod_base = OTHER; note = thymine
  modified_base 17: mod_base = OTHER; note = thymine
  modified_base 18: mod_base = OTHER; note = thymine
ccttagcttccagccatt

SEQ ID NO: 134 - RNA, 18 nt, synthetic construct
  source 1..18: mol_type = other RNA; note = Antisense oligonucleotide
  modified_base 1: mod_base = OTHER; note = thymine
  modified_base 4: mod_base = OTHER; note = thymine
  modified_base 5: mod_base = OTHER; note = thymine
  modified_base 9: mod_base = OTHER; note = thymine
  modified_base 10: mod_base = OTHER; note = thymine
  modified_base 18: mod_base = OTHER; note = thymine
tccttagcttccagccat

SEQ ID NO: 135 - RNA, 18 nt, synthetic construct
  source 1..18: mol_type = other RNA; note = Antisense oligonucleotide
  modified_base 1: mod_base = OTHER; note = thymine
  modified_base 2: mod_base = OTHER; note = thymine
  modified_base 5: mod_base = OTHER; note = thymine
  modified_base 6: mod_base = OTHER; note = thymine
  modified_base 10: mod_base = OTHER; note = thymine
  modified_base 11: mod_base = OTHER; note = thymine
ttccttagcttccagcca

SEQ ID NO: 136 - RNA, 18 nt, synthetic construct
  source 1..18: mol_type = other RNA; note = Antisense oligonucleotide
  modified_base 2: mod_base = OTHER; note = thymine
  modified_base 3: mod_base = OTHER; note = thymine
  modified_base 6: mod_base = OTHER; note = thymine
  modified_base 7: mod_base = OTHER; note = thymine
  modified_base 11: mod_base = OTHER; note = thymine
  modified_base 12: mod_base = OTHER; note = thymine
cttccttagcttccagcc

SEQ ID NO: 137 - RNA, 18 nt, synthetic construct
  source 1..18: mol_type = other RNA; note = Antisense oligonucleotide
  modified_base 1: mod_base = OTHER; note = thymine
  modified_base 2: mod_base = OTHER; note = thymine
  modified_base 4: mod_base = OTHER; note = thymine
  modified_base 5: mod_base = OTHER; note = thymine
  modified_base 8: mod_base = OTHER; note = thymine
  modified_base 9: mod_base = OTHER; note = thymine
  modified_base 13: mod_base = OTHER; note = thymine
  modified_base 14: mod_base = OTHER; note = thymine
ttcttccttagcttccag

SEQ ID NO: 138 - RNA, 18 nt, synthetic construct
  source 1..18: mol_type = other RNA; note = Antisense oligonucleotide
  modified_base 2: mod_base = OTHER; note = thymine
  modified_base 3: mod_base = OTHER; note = thymine
  modified_base 5: mod_base = OTHER; note = thymine
  modified_base 6: mod_base = OTHER; note = thymine
  modified_base 9: mod_base = OTHER; note = thymine
  modified_base 10: mod_base = OTHER; note = thymine
  modified_base 14: mod_base = OTHER; note = thymine
  modified_base 15: mod_base = OTHER; note = thymine
cttcttccttagcttcca

SEQ ID NO: 139 - RNA, 18 nt, synthetic construct
  source 1..18: mol_type = other RNA; note = Antisense oligonucleotide
  modified_base 3: mod_base = OTHER; note = thymine
  modified_base 4: mod_base = OTHER; note = thymine
  modified_base 6: mod_base = OTHER; note = thymine
  modified_base 7: mod_base = OTHER; note = thymine
  modified_base 10: mod_base = OTHER; note = thymine
  modified_base 11: mod_base = OTHER; note = thymine
  modified_base 15: mod_base = OTHER; note = thymine
  modified_base 16: mod_base = OTHER; note = thymine
gcttcttccttagcttcc

SEQ ID NO: 140 - RNA, 18 nt, synthetic construct
  source 1..18: mol_type = other RNA; note = Antisense oligonucleotide
  modified_base 4: mod_base = OTHER; note = thymine
  modified_base 5: mod_base = OTHER; note = thymine
  modified_base 7: mod_base = OTHER; note = thymine
  modified_base 8: mod_base = OTHER; note = thymine
  modified_base 11: mod_base = OTHER; note = thymine
  modified_base 12: mod_base = OTHER; note = thymine
  modified_base 16: mod_base = OTHER; note = thymine
  modified_base 17: mod_base = OTHER; note = thymine
agcttcttccttagcttc

SEQ ID NO: 141 - RNA, 18 nt, synthetic construct
  source 1..18: mol_type = other RNA; note = Antisense oligonucleotide
  modified_base 2: mod_base = OTHER; note = thymine
  modified_base 3: mod_base = OTHER; note = thymine
  modified_base 4: mod_base = OTHER; note = thymine
  modified_base 6: mod_base = OTHER; note = thymine
  modified_base 8: mod_base = OTHER; note = thymine
  modified_base 11: mod_base = OTHER; note = thymine
  modified_base 12: mod_base = OTHER; note = thymine
  modified_base 13: mod_base = OTHER; note = thymine
  modified_base 14: mod_base = OTHER; note = thymine
  modified_base 16: mod_base = OTHER; note = thymine
  modified_base 17: mod_base = OTHER; note = thymine
  modified_base 18: mod_base = OTHER; note = thymine
gtttctgtgattttcttt

SEQ ID NO: 142 - RNA, 18 nt, synthetic construct
  source 1..18: mol_type = other RNA; note = Antisense oligonucleotide
  modified_base 3: mod_base = OTHER; note = thymine
  modified_base 4: mod_base = OTHER; note = thymine
  modified_base 5: mod_base = OTHER; note = thymine
  modified_base 7: mod_base = OTHER; note = thymine
  modified_base 9: mod_base = OTHER; note = thymine
  modified_base 12: mod_base = OTHER; note = thymine
  modified_base 13: mod_base = OTHER; note = thymine
  modified_base 14: mod_base = OTHER; note = thymine
  modified_base 15: mod_base = OTHER; note = thymine
  modified_base 17: mod_base = OTHER; note = thymine
  modified_base 18: mod_base = OTHER; note = thymine
ggtttctgtgattttctt

SEQ ID NO: 143 - RNA, 18 nt, synthetic construct
  source 1..18: mol_type = other RNA; note = Antisense oligonucleotide
  modified_base 1: mod_base = OTHER; note = thymine
  modified_base 4: mod_base = OTHER; note = thymine
  modified_base 5: mod_base = OTHER; note = thymine
  modified_base 6: mod_base = OTHER; note = thymine
  modified_base 8: mod_base = OTHER; note = thymine
  modified_base 10: mod_base = OTHER; note = thymine
  modified_base 13: mod_base = OTHER; note = thymine
  modified_base 14: mod_base = OTHER; note = thymine
  modified_base 15: mod_base = OTHER; note = thymine
  modified_base 16: mod_base = OTHER; note = thymine
  modified_base 18: mod_base = OTHER; note = thymine
tggtttctgtgattttct

SEQ ID NO: 144 - RNA, 18 nt, synthetic construct
  source 1..18: mol_type = other RNA; note = Antisense oligonucleotide
  modified_base 1: mod_base = OTHER; note = thymine
  modified_base 2: mod_base = OTHER; note = thymine
  modified_base 5: mod_base = OTHER; note = thymine
  modified_base 6: mod_base = OTHER; note = thymine
  modified_base 7: mod_base = OTHER; note = thymine
  modified_base 9: mod_base = OTHER; note = thymine
  modified_base 11: mod_base = OTHER; note = thymine
  modified_base 14: mod_base = OTHER; note = thymine
  modified_base 15: mod_base = OTHER; note = thymine
  modified_base 16: mod_base = OTHER; note = thymine
  modified_base 17: mod_base = OTHER; note = thymine
ttggtttctgtgattttc

SEQ ID NO: 145 - RNA, 18 nt, synthetic construct
  source 1..18: mol_type = other RNA; note = Antisense oligonucleotide
  modified_base 3: mod_base = OTHER; note = thymine
  modified_base 4: mod_base = OTHER; note = thymine
  modified_base 7: mod_base = OTHER; note = thymine
  modified_base 8: mod_base = OTHER; note = thymine
  modified_base 9: mod_base = OTHER; note = thymine
  modified_base 11: mod_base = OTHER; note = thymine
  modified_base 13: mod_base = OTHER; note = thymine
  modified_base 16: mod_base = OTHER; note = thymine
  modified_base 17: mod_base = OTHER; note = thymine
  modified_base 18: mod_base = OTHER; note = thymine
ccttggtttctgtgattt

SEQ ID NO: 146 - RNA, 18 nt, synthetic construct
  source 1..18: mol_type = other RNA; note = Antisense oligonucleotide
  modified_base 4: mod_base = OTHER; note = thymine
  modified_base 5: mod_base = OTHER; note = thymine
  modified_base 8: mod_base = OTHER; note = thymine
  modified_base 9: mod_base = OTHER; note = thymine
  modified_base 10: mod_base = OTHER; note = thymine
  modified_base 12: mod_base = OTHER; note = thymine
  modified_base 14: mod_base = OTHER; note = thymine
  modified_base 17: mod_base = OTHER; note = thymine
  modified_base 18: mod_base = OTHER; note = thymine
accttggtttctgtgatt

SEQ ID NO: 147 - RNA, 18 nt, synthetic construct
  source 1..18: mol_type = other RNA; note = Antisense oligonucleotide
  modified_base 5: mod_base = OTHER; note = thymine
  modified_base 6: mod_base = OTHER; note = thymine
  modified_base 9: mod_base = OTHER; note = thymine
  modified_base 10: mod_base = OTHER; note = thymine
  modified_base 11: mod_base = OTHER; note = thymine
  modified_base 13: mod_base = OTHER; note = thymine
  modified_base 15: mod_base = OTHER; note = thymine
  modified_base 18: mod_base = OTHER; note = thymine
aaccttggtttctgtgat

SEQ ID NO: 148 - RNA, 18 nt, synthetic construct
  source 1..18: mol_type = other RNA; note = Antisense oligonucleotide
  modified_base 1: mod_base = OTHER; note = thymine
  modified_base 6: mod_base = OTHER; note = thymine
  modified_base 7: mod_base = OTHER; note = thymine
  modified_base 10: mod_base = OTHER; note = thymine
  modified_base 11: mod_base = OTHER; note = thymine
  modified_base 12: mod_base = OTHER; note = thymine
  modified_base 14: mod_base = OTHER; note = thymine
  modified_base 16: mod_base = OTHER; note = thymine
taaccttggtttctgtga

SEQ ID NO: 149 - RNA, 18 nt, synthetic construct
  source 1..18: mol_type = other RNA; note = Antisense oligonucleotide
  modified_base 1: mod_base = OTHER; note = thymine
  modified_base 2: mod_base = OTHER; note = thymine
  modified_base 5: mod_base = OTHER; note = thymine
  modified_base 8: mod_base = OTHER; note = thymine
  modified_base 13: mod_base = OTHER; note = thymine
  modified_base 14: mod_base = OTHER; note = thymine
  modified_base 17: mod_base = OTHER; note = thymine
  modified_base 18: mod_base = OTHER; note = thymine
ttgatactaaccttggtt

SEQ ID NO: 150 - RNA, 18 nt, synthetic construct
  source 1..18: mol_type = other RNA; note = Antisense oligonucleotide
  modified_base 1: mod_base = OTHER; note = thymine
  modified_base 2: mod_base = OTHER; note = thymine
  modified_base 3: mod_base = OTHER; note = thymine
  modified_base 6: mod_base = OTHER; note = thymine
  modified_base 9: mod_base = OTHER; note = thymine
  modified_base 14: mod_base = OTHER; note = thymine
  modified_base 15: mod_base = OTHER; note = thymine
  modified_base 18: mod_base = OTHER; note = thymine
tttgatactaaccttggt

SEQ ID NO: 151 - RNA, 18 nt, synthetic construct
  source 1..18: mol_type = other RNA; note = Antisense oligonucleotide
  modified_base 2: mod_base = OTHER; note = thymine
  modified_base 3: mod_base = OTHER; note = thymine
  modified_base 4: mod_base = OTHER; note = thymine
  modified_base 7: mod_base = OTHER; note = thymine
  modified_base 10: mod_base = OTHER; note = thymine
  modified_base 15: mod_base = OTHER; note = thymine
  modified_base 16: mod_base = OTHER; note = thymine
ctttgatactaaccttgg

SEQ ID NO: 152 - RNA, 18 nt, synthetic construct
  source 1..18: mol_type = other RNA; note = Antisense oligonucleotide
  modified_base 1: mod_base = OTHER; note = thymine
  modified_base 3: mod_base = OTHER; note = thymine
  modified_base 4: mod_base = OTHER; note = thymine
  modified_base 5: mod_base = OTHER; note = thymine
  modified_base 8: mod_base = OTHER; note = thymine
  modified_base 11: mod_base = OTHER; note = thymine
  modified_base 16: mod_base = OTHER; note = thymine
  modified_base 17: mod_base = OTHER; note = thymine
tctttgatactaaccttg

SEQ ID NO: 153 - RNA, 18 nt, synthetic construct
  source 1..18: mol_type = other RNA; note = Antisense oligonucleotide
  modified_base 1: mod_base = OTHER; note = thymine
  modified_base 3: mod_base = OTHER; note = thymine
  modified_base 5: mod_base = OTHER; note = thymine
  modified_base 6: mod_base = OTHER; note = thymine
  modified_base 7: mod_base = OTHER; note = thymine
  modified_base 10: mod_base = OTHER; note = thymine
  modified_base 13: mod_base = OTHER; note = thymine
  modified_base 18: mod_base = OTHER; note = thymine
tatctttgatactaacct

SEQ ID NO: 154 - RNA, 18 nt, synthetic construct
  source 1..18: mol_type = other RNA; note = Antisense oligonucleotide
  modified_base 2: mod_base = OTHER; note = thymine
  modified_base 4: mod_base = OTHER; note = thymine
  modified_base 6: mod_base = OTHER; note = thymine
  modified_base 7: mod_base = OTHER; note = thymine
  modified_base 8: mod_base = OTHER; note = thymine
  modified_base 11: mod_base = OTHER; note = thymine
  modified_base 14: mod_base = OTHER; note = thymine
gtatctttgatactaacc

SEQ ID NO: 155 - RNA, 18 nt, synthetic construct
  source 1..18: mol_type = other RNA; note = Antisense oligonucleotide
  modified_base 3: mod_base = OTHER; note = thymine
  modified_base 5: mod_base = OTHER; note = thymine
  modified_base 7: mod_base = OTHER; note = thymine
  modified_base 8: mod_base = OTHER; note = thymine
  modified_base 9: mod_base = OTHER; note = thymine
  modified_base 12: mod_base = OTHER; note = thymine
  modified_base 15: mod_base = OTHER; note = thymine
ggtatctttgatactaac

SEQ ID NO: 156 - RNA, 18 nt, synthetic construct
  source 1..18: mol_type = other RNA; note = Antisense oligonucleotide
  modified_base 4: mod_base = OTHER; note = thymine
  modified_base 6: mod_base = OTHER; note = thymine
  modified_base 8: mod_base = OTHER; note = thymine
  modified_base 9: mod_base = OTHER; note = thymine
  modified_base 10: mod_base = OTHER; note = thymine
  modified_base 13: mod_base = OTHER; note = thymine
  modified_base 16: mod_base = OTHER; note = thymine
aggtatctttgatactaa

SEQ ID NO: 157 - RNA, 18 nt, synthetic construct
  source 1..18: mol_type = other RNA; note = Antisense oligonucleotide
  modified_base 4: mod_base = OTHER; note = thymine
  modified_base 8: mod_base = OTHER; note = thymine
  modified_base 14: mod_base = OTHER; note = thymine
  modified_base 15: mod_base = OTHER; note = thymine
ccatgactcaagcttggc

SEQ ID NO: 158 - RNA, 18 nt, synthetic construct
  source 1..18: mol_type = other RNA; note = Antisense oligonucleotide
  modified_base 1: mod_base = OTHER; note = thymine
  modified_base 5: mod_base = OTHER; note = thymine
  modified_base 9: mod_base = OTHER; note = thymine
  modified_base 15: mod_base = OTHER; note = thymine
  modified_base 16: mod_base = OTHER; note = thymine
tccatgactcaagcttgg

SEQ ID NO: 159 - RNA, 18 nt, synthetic construct
  source 1..18: mol_type = other RNA; note = Antisense oligonucleotide
  modified_base 1: mod_base = OTHER; note = thymine
  modified_base 2: mod_base = OTHER; note = thymine
  modified_base 6: mod_base = OTHER; note = thymine
  modified_base 10: mod_base = OTHER; note = thymine
  modified_base 16: mod_base = OTHER; note = thymine
  modified_base 17: mod_base = OTHER; note = thymine
ttccatgactcaagcttg

SEQ ID NO: 160 - RNA, 18 nt, synthetic construct
  source 1..18: mol_type = other RNA; note = Antisense oligonucleotide
  modified_base 2: mod_base = OTHER; note = thymine
  modified_base 3: mod_base = OTHER; note = thymine
  modified_base 7: mod_base = OTHER; note = thymine
  modified_base 11: mod_base = OTHER; note = thymine
  modified_base 17: mod_base = OTHER; note = thymine
  modified_base 18: mod_base = OTHER; note = thymine
cttccatgactcaagctt

SEQ ID NO: 161 - RNA, 18 nt, synthetic construct
  source 1..18: mol_type = other RNA; note = Antisense oligonucleotide
  modified_base 1: mod_base = OTHER; note = thymine
  modified_base 4: mod_base = OTHER; note = thymine
  modified_base 5: mod_base = OTHER; note = thymine
  modified_base 9: mod_base = OTHER; note = thymine
  modified_base 13: mod_base = OTHER; note = thymine
tccttccatgactcaagc

SEQ ID NO: 162 - RNA, 18 nt, synthetic construct
  source 1..18: mol_type = other RNA; note = Antisense oligonucleotide
  modified_base 2: mod_base = OTHER; note = thymine
  modified_base 5: mod_base = OTHER; note = thymine
  modified_base 6: mod_base = OTHER; note = thymine
  modified_base 10: mod_base = OTHER; note = thymine
  modified_base 14: mod_base = OTHER; note = thymine
ctccttccatgactcaag

SEQ ID NO: 163 - RNA, 18 nt, synthetic construct
  source 1..18: mol_type = other RNA; note = Antisense oligonucleotide
  modified_base 3: mod_base = OTHER; note = thymine
  modified_base 6: mod_base = OTHER; note = thymine
  modified_base 7: mod_base = OTHER; note = thymine
  modified_base 11: mod_base = OTHER; note = thymine
  modified_base 15: mod_base = OTHER; note = thymine
cctccttccatgactcaa

SEQ ID NO: 164 - RNA, 18 nt, synthetic construct
  source 1..18: mol_type = other RNA; note = Antisense oligonucleotide
  modified_base 4: mod_base = OTHER; note = thymine
  modified_base 7: mod_base = OTHER; note = thymine
  modified_base 8: mod_base = OTHER; note = thymine
  modified_base 12: mod_base = OTHER; note = thymine
  modified_base 16: mod_base = OTHER; note = thymine
ccctccttccatgactca

SEQ ID NO: 165 - RNA, 18 nt, synthetic construct
  source 1..18: mol_type = other RNA; note = Antisense oligonucleotide
  modified_base 6: mod_base = OTHER; note = thymine
  modified_base 9: mod_base = OTHER; note = thymine
  modified_base 10: mod_base = OTHER; note = thymine
  modified_base 14: mod_base = OTHER; note = thymine
  modified_base 18: mod_base = OTHER; note = thymine
gaccctccttccatgact

SEQ ID NO: 166 - RNA, 18 nt, synthetic construct
  source 1..18: mol_type = other RNA; note = Antisense oligonucleotide
  modified_base 7: mod_base = OTHER; note = thymine
  modified_base 10: mod_base = OTHER; note = thymine
  modified_base 11: mod_base = OTHER; note = thymine
  modified_base 15: mod_base = OTHER; note = thymine
ggaccctccttccatgac

SEQ ID NO: 167 - RNA, 18 nt, synthetic construct
  source 1..18: mol_type = other RNA; note = Antisense oligonucleotide
  modified_base 8: mod_base = OTHER; note = thymine
  modified_base 11: mod_base = OTHER; note = thymine
  modified_base 12: mod_base = OTHER; note = thymine
  modified_base 16: mod_base = OTHER; note = thymine
gggaccctccttccatga

SEQ ID NO: 168 - RNA, 18 nt, synthetic construct
  source 1..18: mol_type = other RNA; note = Antisense oligonucleotide
  modified_base 9: mod_base = OTHER; note = thymine
  modified_base 12: mod_base = OTHER; note = thymine
  modified_base 13: mod_base = OTHER; note = thymine
  modified_base 17: mod_base = OTHER; note = thymine
agggaccctccttccatg

SEQ ID NO: 169 - RNA, 14 nt, synthetic construct
  source 1..14: mol_type = other RNA; note = Antisense oligonucleotide
  modified_base 1: mod_base = OTHER; note = thymine
  modified_base 3: mod_base = OTHER; note = thymine
  modified_base 6: mod_base = OTHER; note = thymine
  modified_base 7: mod_base = OTHER; note = thymine
  modified_base 10: mod_base = OTHER; note = thymine
tgtacttcatccca

SEQ ID NO: 170 - RNA, 14 nt, synthetic construct
  source 1..14: mol_type = other RNA; note = Antisense oligonucleotide
  modified_base 1: mod_base = OTHER; note = thymine
  modified_base 2: mod_base = OTHER; note = thymine
  modified_base 4: mod_base = OTHER; note = thymine
  modified_base 7: mod_base = OTHER; note = thymine
  modified_base 8: mod_base = OTHER; note = thymine
  modified_base 11: mod_base = OTHER; note = thymine
ttgtacttcatccc

SEQ ID NO: 171 - RNA, 14 nt, synthetic construct
  source 1..14: mol_type = other RNA; note = Antisense oligonucleotide
  modified_base 2: mod_base = OTHER; note = thymine
  modified_base 3: mod_base = OTHER; note = thymine
  modified_base 5: mod_base = OTHER; note = thymine
  modified_base 8: mod_base = OTHER; note = thymine
  modified_base 9: mod_base = OTHER; note = thymine
  modified_base 12: mod_base = OTHER; note = thymine
cttgtacttcatcc

SEQ ID NO: 172 - RNA, 14 nt, synthetic construct
  source 1..14: mol_type = other RNA; note = Antisense oligonucleotide
  modified_base 1: mod_base = OTHER; note = thymine
  modified_base 3: mod_base = OTHER; note = thymine
  modified_base 4: mod_base = OTHER; note = thymine
  modified_base 6: mod_base = OTHER; note = thymine
  modified_base 9: mod_base = OTHER; note = thymine
  modified_base 10: mod_base = OTHER; note = thymine
  modified_base 13: mod_base = OTHER; note = thymine
tcttgtacttcatc

SEQ ID NO: 173 - RNA, 14 nt, synthetic construct
  source 1..14: mol_type = other RNA; note = Antisense oligonucleotide
  modified_base 2: mod_base = OTHER; note = thymine
  modified_base 3: mod_base = OTHER; note = thymine
  modified_base 5: mod_base = OTHER; note = thymine
  modified_base 6: mod_base = OTHER; note = thymine
  modified_base 8: mod_base = OTHER; note = thymine
  modified_base 11: mod_base = OTHER; note = thymine
  modified_base 12: mod_base = OTHER; note = thymine
gttcttgtacttca

SEQ ID NO: 174 - RNA, 14 nt, synthetic construct
  source 1..14: mol_type = other RNA; note = Antisense oligonucleotide
  modified_base 2: mod_base = OTHER; note = thymine
  modified_base 4: mod_base = OTHER; note = thymine
  modified_base 5: mod_base = OTHER; note = thymine
  modified_base 7: mod_base = OTHER; note = thymine
  modified_base 8: mod_base = OTHER; note = thymine
  modified_base 10: mod_base = OTHER; note = thymine
  modified_base 13: mod_base = OTHER; note = thymine
  modified_base 14: mod_base = OTHER; note = thymine
gtgttcttgtactt

SEQ ID NO: 175 - RNA, 14 nt, synthetic construct
  source 1..14: mol_type = other RNA; note = Antisense oligonucleotide
  modified_base 4: mod_base = OTHER; note = thymine
  modified_base 6: mod_base = OTHER; note = thymine
  modified_base 7: mod_base = OTHER; note = thymine
  modified_base 9: mod_base = OTHER; note = thymine
  modified_base 10: mod_base = OTHER; note = thymine
  modified_base 12: mod_base = OTHER; note = thymine
aggtgttcttgtac

SEQ ID NO: 176 - RNA, 14 nt, synthetic construct
  source 1..14: mol_type = other RNA; note = Antisense oligonucleotide
  modified_base 5: mod_base = OTHER; note = thymine
  modified_base 7: mod_base = OTHER; note = thymine
  modified_base 8: mod_base = OTHER; note = thymine
  modified_base 10: mod_base = OTHER; note = thymine
  modified_base 11: mod_base = OTHER; note = thymine
  modified_base 13: mod_base = OTHER; note = thymine
aaggtgttcttgta

SEQ ID NO: 177 - RNA, 15 nt, synthetic construct
  source 1..15: mol_type = other RNA; note = Antisense oligonucleotide
  modified_base 1: mod_base = OTHER; note = thymine
  modified_base 2: mod_base = OTHER; note = thymine
  modified_base 4: mod_base = OTHER; note = thymine
  modified_base 7: mod_base = OTHER; note = thymine
  modified_base 8: mod_base = OTHER; note = thymine
  modified_base 11: mod_base = OTHER; note = thymine
ttgtacttcatccca

SEQ ID NO: 178 - RNA, 15 nt, synthetic construct
  source 1..15: mol_type = other RNA; note = Antisense oligonucleotide
  modified_base 2: mod_base = OTHER; note = thymine
  modified_base 3: mod_base = OTHER; note = thymine
  modified_base 5: mod_base = OTHER; note = thymine
  modified_base 8: mod_base = OTHER; note = thymine
  modified_base 9: mod_base = OTHER; note = thymine
  modified_base 12: mod_base = OTHER; note = thymine
cttgtacttcatccc

SEQ ID NO: 179 - RNA, 15 nt, synthetic construct
  source 1..15: mol_type = other RNA; note = Antisense oligonucleotide
  modified_base 1: mod_base = OTHER; note = thymine
  modified_base 3: mod_base = OTHER; note = thymine
  modified_base 4: mod_base = OTHER; note = thymine
  modified_base 6: mod_base = OTHER; note = thymine
  modified_base 9: mod_base = OTHER; note = thymine
  modified_base 10: mod_base = OTHER; note = thymine
  modified_base 13: mod_base = OTHER; note = thymine
tcttgtacttcatcc

SEQ ID NO: 180 - RNA, 15 nt, synthetic construct
  source 1..15: mol_type = other RNA; note = Antisense oligonucleotide
  modified_base 1: mod_base = OTHER; note = thymine
  modified_base 2: mod_base = OTHER; note = thymine
  modified_base 4: mod_base = OTHER; note = thymine
  modified_base 5: mod_base = OTHER; note = thymine
  modified_base 7: mod_base = OTHER; note = thymine
  modified_base 10: mod_base = OTHER; note = thymine
  modified_base 11: mod_base = OTHER; note = thymine
  modified_base 14: mod_base = OTHER; note = thymine
ttcttgtacttcatc

SEQ ID NO: 181 - RNA, 15 nt, synthetic construct
  source 1..15: mol_type = other RNA; note = Antisense oligonucleotide
  modified_base 2: mod_base = OTHER; note = thymine
  modified_base 3: mod_base = OTHER; note = thymine
  modified_base 5: mod_base = OTHER; note = thymine
  modified_base 6: mod_base = OTHER; note = thymine
  modified_base 8: mod_base = OTHER; note = thymine
  modified_base 11: mod_base = OTHER; note = thymine
  modified_base 12: mod_base = OTHER; note = thymine
  modified_base 15: mod_base = OTHER; note = thymine
gttcttgtacttcat

SEQ ID NO: 182 - RNA, 15 nt, synthetic construct
  source 1..15: mol_type = other RNA; note = Antisense oligonucleotide
  modified_base 1: mod_base = OTHER; note = thymine
  modified_base 3: mod_base = OTHER; note = thymine
  modified_base 4: mod_base = OTHER; note = thymine
  modified_base 6: mod_base = OTHER; note = thymine
  modified_base 7: mod_base = OTHER; note = thymine
  modified_base 9: mod_base = OTHER; note = thymine
  modified_base 12: mod_base = OTHER; note = thymine
  modified_base 13: mod_base = OTHER; note = thymine
tgttcttgtacttca

SEQ ID NO: 183 - RNA, 15 nt, synthetic construct
  source 1..15: mol_type = other RNA; note = Antisense oligonucleotide
  modified_base 2: mod_base = OTHER; note = thymine
  modified_base 4: mod_base = OTHER; note = thymine
  modified_base 5: mod_base = OTHER; note = thymine
  modified_base 7: mod_base = OTHER; note = thymine
  modified_base 8: mod_base = OTHER; note = thymine
  modified_base 10: mod_base = OTHER; note = thymine
  modified_base 13: mod_base = OTHER; note = thymine
  modified_base 14: mod_base = OTHER; note = thymine
gtgttcttgtacttc

SEQ ID NO: 184 - RNA, 15 nt, synthetic construct
  source 1..15: mol_type = other RNA; note = Antisense oligonucleotide
  modified_base 3: mod_base = OTHER; note = thymine
  modified_base 5: mod_base = OTHER; note = thymine
  modified_base 6: mod_base = OTHER; note = thymine
  modified_base 8: mod_base = OTHER; note = thymine
  modified_base 9: mod_base = OTHER; note = thymine
  modified_base 11: mod_base = OTHER; note = thymine
  modified_base 14: mod_base = OTHER; note = thymine
  modified_base 15: mod_base = OTHER; note = thymine
ggtgttcttgtactt

SEQ ID NO: 185 - RNA, 15 nt, synthetic construct
  source 1..15: mol_type = other RNA; note = Antisense oligonucleotide
  modified_base 4: mod_base = OTHER; note = thymine
  modified_base 6: mod_base = OTHER; note = thymine
  modified_base 7: mod_base = OTHER; note = thymine
  modified_base 9: mod_base = OTHER; note = thymine
  modified_base 10: mod_base = OTHER; note = thymine
  modified_base 12: mod_base = OTHER; note = thymine
  modified_base 15: mod_base = OTHER; note = thymine
aggtgttcttgtact

SEQ ID NO: 186 - RNA, 15 nt, synthetic construct
  source 1..15: mol_type = other RNA; note = Antisense oligonucleotide
  modified_base 5: mod_base = OTHER; note = thymine
  modified_base 7: mod_base = OTHER; note = thymine
  modified_base 8: mod_base = OTHER; note = thymine
  modified_base 10: mod_base = OTHER; note = thymine
  modified_base 11: mod_base = OTHER; note = thymine
  modified_base 13: mod_base = OTHER; note = thymine
aaggtgttcttgtac

SEQ ID NO: 187 - RNA, 16 nt, synthetic construct
  source 1..16: mol_type = other RNA; note = Antisense oligonucleotide
  modified_base 2: mod_base = OTHER; note = thymine
  modified_base 3: mod_base = OTHER; note = thymine
  modified_base 5: mod_base = OTHER; note = thymine
  modified_base 8: mod_base = OTHER; note = thymine
  modified_base 9: mod_base = OTHER; note = thymine
  modified_base 12: mod_base = OTHER; note = thymine
cttgtacttcatccca

SEQ ID NO: 188 - RNA, 16 nt, synthetic construct
  source 1..16: mol_type = other RNA; note = Antisense oligonucleotide
  modified_base 1: mod_base = OTHER; note = thymine
  modified_base 3: mod_base = OTHER; note = thymine
  modified_base 4: mod_base = OTHER; note = thymine
  modified_base 6: mod_base = OTHER; note = thymine
  modified_base 9: mod_base = OTHER; note = thymine
  modified_base 10: mod_base = OTHER; note = thymine
  modified_base 13: mod_base = OTHER; note = thymine
tcttgtacttcatccc

SEQ ID NO: 189 - RNA, 16 nt, synthetic construct
  source 1..16: mol_type = other RNA; note = Antisense oligonucleotide
  modified_base 1: mod_base = OTHER; note = thymine
  modified_base 2: mod_base = OTHER; note = thymine
  modified_base 4: mod_base = OTHER; note = thymine
  modified_base 5: mod_base = OTHER; note = thymine
  modified_base 7: mod_base = OTHER; note = thymine
  modified_base 10: mod_base = OTHER; note = thymine
  modified_base 11: mod_base = OTHER; note = thymine
  modified_base 14: mod_base = OTHER; note = thymine
ttcttgtacttcatcc

SEQ ID NO: 190 - RNA, 16 nt, synthetic construct
  source 1..16: mol_type = other RNA; note = Antisense oligonucleotide
  modified_base 2: mod_base = OTHER; note = thymine
  modified_base 3: mod_base = OTHER; note = thymine
  modified_base 5: mod_base = OTHER; note = thymine
  modified_base 6: mod_base = OTHER; note = thymine
  modified_base 8: mod_base = OTHER; note = thymine
  modified_base 11: mod_base = OTHER; note = thymine
  modified_base 12: mod_base = OTHER; note = thymine
  modified_base 15: mod_base = OTHER; note = thymine
gttcttgtacttcatc

SEQ ID NO: 191 - RNA, 16 nt, synthetic construct
  source 1..16: mol_type = other RNA; note = Antisense oligonucleotide
  modified_base 4: mod_base = OTHER; note = thymine
  modified_base 6: mod_base = OTHER; note = thymine
  modified_base 7: mod_base = OTHER; note = thymine
  modified_base 9: mod_base = OTHER; note = thymine
  modified_base 10: mod_base = OTHER; note = thymine
  modified_base 12: mod_base = OTHER; note = thymine
  modified_base 15: mod_base = OTHER; note = thymine
  modified_base 16: mod_base = OTHER; note = thymine
aggtgttcttgtactt

SEQ ID NO: 192 - RNA, 16 nt, synthetic construct
  source 1..16: mol_type = other RNA; note = Antisense oligonucleotide
  modified_base 5: mod_base = OTHER; note = thymine
  modified_base 7: mod_base = OTHER; note = thymine
  modified_base 8: mod_base = OTHER; note = thymine
  modified_base 10: mod_base = OTHER; note = thymine
  modified_base 11: mod_base = OTHER; note = thymine
  modified_base 13: mod_base = OTHER; note = thymine
  modified_base 16: mod_base = OTHER; note = thymine
aaggtgttcttgtact

SEQ ID NO: 193 - RNA, 17 nt, synthetic construct
  source 1..17: mol_type = other RNA; note = Antisense oligonucleotide
  modified_base 1: mod_base = OTHER; note = thymine
  modified_base 3: mod_base = OTHER; note = thymine
  modified_base 4: mod_base = OTHER; note = thymine
  modified_base 6: mod_base = OTHER; note = thymine
  modified_base 9: mod_base = OTHER; note = thymine
  modified_base 10: mod_base = OTHER; note = thymine
  modified_base 13: mod_base = OTHER; note = thymine
tcttgtacttcatccca

SEQ ID NO: 194 - RNA, 17 nt, synthetic construct
  source 1..17: mol_type = other RNA; note = Antisense oligonucleotide
  modified_base 1: mod_base = OTHER; note = thymine
  modified_base 2: mod_base = OTHER; note = thymine
  modified_base 4: mod_base = OTHER; note = thymine
  modified_base 5: mod_base = OTHER; note = thymine
  modified_base 7: mod_base = OTHER; note = thymine
  modified_base 10: mod_base = OTHER; note = thymine
  modified_base 11: mod_base = OTHER; note = thymine
  modified_base 14: mod_base = OTHER; note = thymine
ttcttgtacttcatccc

SEQ ID NO: 195 - RNA, 17 nt, synthetic construct
  source 1..17: mol_type = other RNA; note = Antisense oligonucleotide
  modified_base 2: mod_base = OTHER; note = thymine
  modified_base 3: mod_base = OTHER; note = thymine
  modified_base 5: mod_base = OTHER; note = thymine
  modified_base 6: mod_base = OTHER; note = thymine
  modified_base 8: mod_base = OTHER; note = thymine
  modified_base 11: mod_base = OTHER; note = thymine
  modified_base 12: mod_base = OTHER; note = thymine
  modified_base 15: mod_base = OTHER; note = thymine
gttcttgtacttcatcc

SEQ ID NO: 196 - RNA, 17 nt, synthetic construct
  source 1..17: mol_type = other RNA; note = Antisense oligonucleotide
  modified_base 1: mod_base = OTHER; note = thymine
  modified_base 3: mod_base = OTHER; note = thymine
  modified_base 4: mod_base = OTHER; note = thymine
  modified_base 6: mod_base = OTHER; note = thymine
  modified_base 7: mod_base = OTHER; note = thymine
  modified_base 9: mod_base = OTHER; note = thymine
  modified_base 12: mod_base = OTHER; note = thymine
  modified_base 13: mod_base = OTHER; note = thymine
  modified_base 16: mod_base = OTHER; note = thymine
tgttcttgtacttcatc

SEQ ID NO: 197 - RNA, 17 nt, synthetic construct
  source 1..17: mol_type = other RNA; note = Antisense oligonucleotide
  modified_base 2: mod_base = OTHER; note = thymine
  modified_base 4: mod_base = OTHER; note = thymine
  modified_base 5: mod_base = OTHER; note = thymine
  modified_base 7: mod_base = OTHER; note = thymine
  modified_base 8: mod_base = OTHER; note = thymine
  modified_base 10: mod_base = OTHER; note = thymine
  modified_base 13: mod_base = OTHER; note = thymine
  modified_base 14: mod_base = OTHER; note = thymine
  modified_base 17: mod_base = OTHER; note = thymine
gtgttcttgtacttcat

SEQ ID NO: 198 - RNA, 17 nt, synthetic construct
  source 1..17: mol_type = other RNA; note = Antisense oligonucleotide
  modified_base 3: mod_base = OTHER; note = thymine
  modified_base 5: mod_base = OTHER; note = thymine
  modified_base 6: mod_base = OTHER; note = thymine
  modified_base 8: mod_base = OTHER; note = thymine
  modified_base 9: mod_base = OTHER; note = thymine
  modified_base 11: mod_base = OTHER; note = thymine
  modified_base 14: mod_base = OTHER; note = thymine
  modified_base 15: mod_base = OTHER; note = thymine
ggtgttcttgtacttca

SEQ ID NO: 199 - RNA, 17 nt, synthetic construct
  source 1..17: mol_type = other RNA; note = Antisense oligonucleotide
  modified_base 4: mod_base = OTHER; note = thymine
  modified_base 6: mod_base = OTHER; note = thymine
  modified_base 7: mod_base = OTHER; note = thymine
  modified_base 9: mod_base = OTHER; note = thymine
  modified_base 10: mod_base = OTHER; note = thymine
  modified_base 12: mod_base = OTHER; note = thymine
  modified_base 15: mod_base = OTHER; note = thymine
  modified_base 16: mod_base = OTHER; note = thymine
aggtgttcttgtacttc

SEQ ID NO: 200 - RNA, 17 nt, synthetic construct
  source 1..17: mol_type = other RNA; note = Antisense oligonucleotide
  modified_base 5: mod_base = OTHER; note = thymine
  modified_base 7: mod_base = OTHER; note = thymine
  modified_base 8: mod_base = OTHER; note = thymine
  modified_base 10: mod_base = OTHER; note = thymine
  modified_base 11: mod_base = OTHER; note = thymine
  modified_base 13: mod_base = OTHER; note = thymine
  modified_base 16: mod_base = OTHER; note = thymine
  modified_base 17: mod_base = OTHER; note = thymine
aaggtgttcttgtactt

SEQ ID NO: 201 - RNA, 19 nt, synthetic construct
  source 1..19: mol_type = other RNA; note = Antisense oligonucleotide
  modified_base 2: mod_base = OTHER; note = thymine
  modified_base 3: mod_base = OTHER; note = thymine
  modified_base 5: mod_base = OTHER; note = thymine
  modified_base 6: mod_base = OTHER; note = thymine
  modified_base 8: mod_base = OTHER; note = thymine
  modified_base 11: mod_base = OTHER; note = thymine
  modified_base 12: mod_base = OTHER; note = thymine
  modified_base 15: mod_base = OTHER; note = thymine
gttcttgtacttcatccca

SEQ ID NO: 202 - RNA, 19 nt, synthetic construct
  source 1..19: mol_type = other RNA; note = Antisense oligonucleotide
  modified_base 1: mod_base = OTHER; note = thymine
  modified_base 3: mod_base = OTHER; note = thymine
  modified_base 4: mod_base = OTHER; note = thymine
  modified_base 6: mod_base = OTHER; note = thymine
  modified_base 7: mod_base = OTHER; note = thymine
  modified_base 9: mod_base = OTHER; note = thymine
  modified_base 12: mod_base = OTHER; note = thymine
  modified_base 13: mod_base = OTHER; note = thymine
  modified_base 16: mod_base = OTHER; note = thymine
tgttcttgtacttcatccc

SEQ ID NO: 203 - RNA, 19 nt, synthetic construct
  source 1..19: mol_type = other RNA; note = Antisense oligonucleotide
  modified_base 2: mod_base = OTHER; note = thymine
  modified_base 4: mod_base = OTHER; note = thymine
  modified_base 5: mod_base = OTHER; note = thymine
  modified_base 7: mod_base = OTHER; note = thymine
  modified_base 8: mod_base = OTHER; note = thymine
  modified_base 10: mod_base = OTHER; note = thymine
  modified_base 13: mod_base = OTHER; note = thymine
  modified_base 14: mod_base = OTHER; note = thymine
  modified_base 17: mod_base = OTHER; note = thymine
gtgttcttgtacttcatcc

SEQ ID NO: 204 - RNA, 19 nt, synthetic construct
  source 1..19: mol_type = other RNA; note = Antisense oligonucleotide
  modified_base 3: mod_base = OTHER; note = thymine
  modified_base 5: mod_base = OTHER; note = thymine
  modified_base 6: mod_base = OTHER; note = thymine
  modified_base 8: mod_base = OTHER; note = thymine
  modified_base 9: mod_base = OTHER; note = thymine
  modified_base 11: mod_base = OTHER; note = thymine
  modified_base 14: mod_base = OTHER; note = thymine
  modified_base 15: mod_base = OTHER; note = thymine
  modified_base 18: mod_base = OTHER; note = thymine
ggtgttcttgtacttcatc

SEQ ID NO: 205 - RNA, 19 nt, synthetic construct
  source 1..19: mol_type = other RNA; note = Antisense oligonucleotide
  modified_base 4: mod_base = OTHER; note = thymine
  modified_base 6: mod_base = OTHER; note = thymine
  modified_base 7: mod_base = OTHER; note = thymine
  modified_base 9: mod_base = OTHER; note = thymine
  modified_base 10: mod_base = OTHER; note = thymine
  modified_base 12: mod_base = OTHER; note = thymine
  modified_base 15: mod_base = OTHER; note = thymine
  modified_base 16: mod_base = OTHER; note = thymine
  modified_base 19: mod_base = OTHER; note = thymine
aggtgttcttgtacttcat

SEQ ID NO: 206 - RNA, 19 nt, synthetic construct
  source 1..19: mol_type = other RNA; note = Antisense oligonucleotide
  modified_base 5: mod_base = OTHER; note = thymine
  modified_base 7: mod_base = OTHER; note = thymine
  modified_base 8: mod_base = OTHER; note = thymine
  modified_base 10: mod_base = OTHER; note = thymine
  modified_base 11: mod_base = OTHER; note = thymine
  modified_base 13: mod_base = OTHER; note = thymine
  modified_base 16: mod_base = OTHER; note = thymine
  modified_base 17: mod_base = OTHER; note = thymine
aaggtgttcttgtacttca

SEQ ID NO: 207 - RNA, 20 nt, synthetic construct
  source 1..20: mol_type = other RNA; note = Antisense oligonucleotide
  modified_base 1: mod_base = OTHER; note = thymine
  modified_base 3: mod_base = OTHER; note = thymine
  modified_base 4: mod_base = OTHER; note = thymine
  modified_base 6: mod_base = OTHER; note = thymine
  modified_base 7: mod_base = OTHER; note = thymine
  modified_base 9: mod_base = OTHER; note = thymine
  modified_base 12: mod_base = OTHER; note = thymine
  modified_base 13: mod_base = OTHER; note = thymine
  modified_base 16: mod_base = OTHER; note = thymine
tgttcttgtacttcatccca

SEQ ID NO: 208 - RNA, 20 nt, synthetic construct
  source 1..20: mol_type = other RNA; note = Antisense oligonucleotide
  modified_base 2: mod_base = OTHER; note = thymine
  modified_base 4: mod_base = OTHER; note = thymine
  modified_base 5: mod_base = OTHER; note = thymine
  modified_base 7: mod_base = OTHER; note = thymine
  modified_base 8: mod_base = OTHER; note = thymine
  modified_base 10: mod_base = OTHER; note = thymine
  modified_base 13: mod_base = OTHER; note = thymine
  modified_base 14: mod_base = OTHER; note = thymine
  modified_base 17: mod_base = OTHER; note = thymine
gtgttcttgtacttcatccc

SEQ ID NO: 209 - RNA, 36 nt, synthetic construct
  source 1..36: mol_type = other RNA; note = Antisense oligonucleotide
  modified_base 6: mod_base = OTHER; note = thymine
  modified_base 7: mod_base = OTHER; note = thymine
  modified_base 9: mod_base = OTHER; note = thymine
  modified_base 11: mod_base = OTHER; note = thymine
  modified_base 12: mod_base = OTHER; note = thymine
  modified_base 16: mod_base = OTHER; note = thymine
  modified_base 19: mod_base = OTHER; note = thymine
  modified_base 21: mod_base = OTHER; note = thymine
  modified_base 22: mod_base = OTHER; note = thymine
  modified_base 24: mod_base = OTHER; note = thymine
  modified_base 25: mod_base = OTHER; note = thymine
  modified_base 27: mod_base = OTHER; note = thymine
  modified_base 30: mod_base = OTHER; note = thymine
  modified_base 31: mod_base = OTHER; note = thymine
  modified_base 34: mod_base = OTHER; note = thymine
agccattgtgttgaatcctgttcttgtacttcatcc

SEQ ID NO: 210 - RNA, 36 nt, synthetic construct
  source 1..36: mol_type = other RNA; note = Antisense oligonucleotide
  modified_base 1: mod_base = OTHER; note = thymine
  modified_base 3: mod_base = OTHER; note = thymine
  modified_base 4: mod_base = OTHER; note = thymine
  modified_base 6: mod_base = OTHER; note = thymine
  modified_base 7: mod_base = OTHER; note = thymine
  modified_base 9: mod_base = OTHER; note = thymine
  modified_base 12: mod_base = OTHER; note = thymine
  modified_base 13: mod_base = OTHER; note = thymine
  modified_base 16: mod_base = OTHER; note = thymine
  modified_base 24: mod_base = OTHER; note = thymine
  modified_base 25: mod_base = OTHER; note = thymine
  modified_base 27: mod_base = OTHER; note = thymine
  modified_base 29: mod_base = OTHER; note = thymine
  modified_base 30: mod_base = OTHER; note = thymine
  modified_base 34: mod_base = OTHER; note = thymine
tgttcttgtacttcatccagccattgtgttgaatcc

SEQ ID NO: 211 - RNA, 32 nt, synthetic construct
  source 1..32: mol_type = other RNA; note = Antisense oligonucleotide
  modified_base 4: mod_base = OTHER; note = thymine
  modified_base 5: mod_base = OTHER; note = thymine
  modified_base 7: mod_base = OTHER; note = thymine
  modified_base 9: mod_base = OTHER; note = thymine
  modified_base 10: mod_base = OTHER; note = thymine
  modified_base 14: mod_base = OTHER; note = thymine
  modified_base 18: mod_base = OTHER; note = thymine
  modified_base 19: mod_base = OTHER; note = thymine
  modified_base 21: mod_base = OTHER; note = thymine
  modified_base 22: mod_base = OTHER; note = thymine
  modified_base 24: mod_base = OTHER; note = thymine
  modified_base 27: mod_base = OTHER; note = thymine
  modified_base 28: mod_base = OTHER; note = thymine
  modified_base 31: mod_base = OTHER; note = thymine
ccattgtgttgaatccgttcttgtacttcatc

SEQ ID NO: 212 - RNA, 32 nt, synthetic construct
  source 1..32: mol_type = other RNA; note = Antisense oligonucleotide
  modified_base 2: mod_base = OTHER; note = thymine
  modified_base 3: mod_base = OTHER; note = thymine
  modified_base 5: mod_base = OTHER; note = thymine
  modified_base 6: mod_base = OTHER; note = thymine
  modified_base 8: mod_base = OTHER; note = thymine
  modified_base 11: mod_base = OTHER; note = thymine
  modified_base 12: mod_base = OTHER; note = thymine
  modified_base 15: mod_base = OTHER; note = thymine
  modified_base 20: mod_base = OTHER; note = thymine
  modified_base 21: mod_base = OTHER; note = thymine
  modified_base 23: mod_base = OTHER; note = thymine
  modified_base 25: mod_base = OTHER; note = thymine
  modified_base 26: mod_base = OTHER; note = thymine
  modified_base 30: mod_base = OTHER; note = thymine
gttcttgtacttcatcccattgtgttgaatcc

SEQ ID NO: 213 - RNA, 28 nt, synthetic construct
  source 1..28: mol_type = other RNA; note = Antisense oligonucleotide
  modified_base 2: mod_base = OTHER; note = thymine
  modified_base 3: mod_base = OTHER; note = thymine
  modified_base 5: mod_base = OTHER; note = thymine
  modified_base 7: mod_base = OTHER; note = thymine
  modified_base 8: mod_base = OTHER; note = thymine
  modified_base 12: mod_base = OTHER; note = thymine
  modified_base 16: mod_base = OTHER; note = thymine
  modified_base 17: mod_base = OTHER; note = thymine
  modified_base 19: mod_base = OTHER; note = thymine
  modified_base 20: mod_base = OTHER; note = thymine
  modified_base 22: mod_base = OTHER; note = thymine
  modified_base 25: mod_base = OTHER; note = thymine
  modified_base 26: mod_base = OTHER; note = thymine
attgtgttgaatccgttcttgtacttca

SEQ ID NO: 214 - RNA, 28 nt, synthetic construct
  source 1..28: mol_type = other RNA; note = Antisense oligonucleotide
  modified_base 2: mod_base = OTHER; note = thymine
  modified_base 3: mod_base = OTHER; note = thymine
  modified_base 5: mod_base = OTHER; note = thymine
  modified_base 6: mod_base = OTHER; note = thymine
  modified_base 8: mod_base = OTHER; note = thymine
  modified_base 11: mod_base = OTHER; note = thymine
  modified_base 12: mod_base = OTHER; note = thymine
  modified_base 16: mod_base = OTHER; note = thymine
  modified_base 17: mod_base = OTHER; note = thymine
  modified_base 19: mod_base = OTHER; note = thymine
  modified_base 21: mod_base = OTHER; note = thymine
  modified_base 22: mod_base = OTHER; note = thymine
  modified_base 26: mod_base = OTHER; note = thymine
gttcttgtacttcaattgtgttgaatcc

SEQ ID NO: 215 - RNA, 24 nt, synthetic construct
  source 1..24: mol_type = other RNA; note = Antisense oligonucleotide
  modified_base 1: mod_base = OTHER; note = thymine
  modified_base 3: mod_base = OTHER; note = thymine
  modified_base 4: mod_base = OTHER; note = thymine
  modified_base 6: mod_base = OTHER; note = thymine
  modified_base 9: mod_base = OTHER; note = thymine
  modified_base 10: mod_base = OTHER; note = thymine
  modified_base 13: mod_base = OTHER; note = thymine
  modified_base 15: mod_base = OTHER; note = thymine
  modified_base 17: mod_base = OTHER; note = thymine
  modified_base 18: mod_base = OTHER; note = thymine
  modified_base 22: mod_base = OTHER; note = thymine
tcttgtacttcatgtgttgaatcc

SEQ ID NO: 216 - RNA, 24 nt, synthetic construct
  source 1..24: mol_type = other RNA; note = Antisense oligonucleotide
  modified_base 1: mod_base = OTHER; note = thymine
  modified_base 3: mod_base = OTHER; note = thymine
  modified_base 4: mod_base = OTHER; note = thymine
  modified_base 6: mod_base = OTHER; note = thymine
  modified_base 9: mod_base = OTHER; note = thymine
  modified_base 10: mod_base = OTHER; note = thymine
  modified_base 13: mod_base = OTHER; note = thymine
  modified_base 14: mod_base = OTHER; note = thymine
  modified_base 16: mod_base = OTHER; note = thymine
  modified_base 18: mod_base = OTHER; note = thymine
  modified_base 19: mod_base = OTHER; note = thymine
  modified_base 23: mod_base = OTHER; note = thymine
tcttgtacttcattgtgttgaatc

SEQ ID NO: 217 - RNA, 24 nt, synthetic construct
  source 1..24: mol_type = other RNA; note = Antisense oligonucleotide
  modified_base 1: mod_base = OTHER; note = thymine
  modified_base 3: mod_base = OTHER; note = thymine
  modified_base 4: mod_base = OTHER; note = thymine
  modified_base 6: mod_base = OTHER; note = thymine
  modified_base 9: mod_base = OTHER; note = thymine
  modified_base 10: mod_base = OTHER; note = thymine
  modified_base 14: mod_base = OTHER; note = thymine
  modified_base 15: mod_base = OTHER; note = thymine
  modified_base 24: mod_base = OTHER; note = thymine
tcttgtacttcaattcaacacaat

SEQ ID NO: 218 - RNA, 24 nt, synthetic construct
  source 1..24: mol_type = other RNA; note = Antisense oligonucleotide
  modified_base 1: mod_base = OTHER; note = thymine
  modified_base 2: mod_base = OTHER; note = thymine
  modified_base 4: mod_base = OTHER; note = thymine
  modified_base 5: mod_base = OTHER; note = thymine
  modified_base 7: mod_base = OTHER; note = thymine
  modified_base 10: mod_base = OTHER; note = thymine
  modified_base 11: mod_base = OTHER; note = thymine
  modified_base 13: mod_base = OTHER; note = thymine
  modified_base 15: mod_base = OTHER; note = thymine
  modified_base 17: mod_base = OTHER; note = thymine
  modified_base 18: mod_base = OTHER; note = thymine
  modified_base 22: mod_base = OTHER; note = thymine
ttcttgtacttctgtgttgaatcc

SEQ ID NO: 219 - RNA, 24 nt, synthetic construct
  source 1..24: mol_type = other RNA; note = Antisense oligonucleotide
  modified_base 1: mod_base = OTHER; note = thymine
  modified_base 2: mod_base = OTHER; note = thymine
  modified_base 4: mod_base = OTHER; note = thymine
  modified_base 5: mod_base = OTHER; note = thymine
  modified_base 7: mod_base = OTHER; note = thymine
  modified_base 10: mod_base = OTHER; note = thymine
  modified_base 11: mod_base = OTHER; note = thymine
  modified_base 13: mod_base = OTHER; note = thymine
  modified_base 14: mod_base = OTHER; note = thymine
  modified_base 16: mod_base = OTHER; note = thymine
  modified_base 18: mod_base = OTHER; note = thymine
  modified_base 19: mod_base = OTHER; note = thymine
  modified_base 23: mod_base = OTHER; note = thymine
ttcttgtacttcttgtgttgaatc

SEQ ID NO: 220 - RNA, 24 nt, synthetic construct
  source 1..24: mol_type = other RNA; note = Antisense oligonucleotide
  modified_base 1: mod_base = OTHER; note = thymine
  modified_base 2: mod_base = OTHER; note = thymine
  modified_base 4: mod_base = OTHER; note = thymine
  modified_base 5: mod_base = OTHER; note = thymine
  modified_base 7: mod_base = OTHER; note = thymine
  modified_base 10: mod_base = OTHER; note = thymine
  modified_base 11: mod_base = OTHER; note = thymine
  modified_base 14: mod_base = OTHER; note = thymine
  modified_base 15: mod_base = OTHER; note = thymine
  modified_base 24: mod_base = OTHER; note = thymine
ttcttgtacttcattcaacacaat

SEQ ID NO: 221 - RNA, 24 nt, synthetic construct
  source 1..24: mol_type = other RNA; note = Antisense oligonucleotide
  modified_base 2: mod_base = OTHER; note = thymine
  modified_base 3: mod_base = OTHER; note = thymine
  modified_base 5: mod_base = OTHER; note = thymine
  modified_base 6: mod_base = OTHER; note = thymine
  modified_base 8: mod_base = OTHER; note = thymine
  modified_base 11: mod_base = OTHER; note = thymine
  modified_base 12: mod_base = OTHER; note = thymine
  modified_base 13: mod_base = OTHER; note = thymine
  modified_base 15: mod_base = OTHER; note = thymine
  modified_base 17: mod_base = OTHER; note = thymine
  modified_base 18: mod_base = OTHER; note = thymine
  modified_base 22: mod_base = OTHER; note = thymine
gttcttgtactttgtgttgaatcc

SEQ ID NO: 222 - RNA, 24 nt, synthetic construct
  source 1..24: mol_type = other RNA; note = Antisense oligonucleotide
  modified_base 2: mod_base = OTHER; note = thymine
  modified_base 3: mod_base = OTHER; note = thymine
  modified_base 5: mod_base = OTHER; note = thymine
  modified_base 6: mod_base = OTHER; note = thymine
  modified_base 8: mod_base = OTHER; note = thymine
  modified_base 11: mod_base = OTHER; note = thymine
  modified_base 12: mod_base = OTHER; note = thymine
  modified_base 13: mod_base = OTHER; note = thymine
  modified_base 14: mod_base = OTHER; note = thymine
  modified_base 16: mod_base = OTHER; note = thymine
  modified_base 18: mod_base = OTHER; note = thymine
  modified_base 19: mod_base = OTHER; note = thymine
  modified_base 23: mod_base = OTHER; note = thymine
gttcttgtacttttgtgttgaatc

SEQ ID NO: 223 - RNA, 24 nt, synthetic construct
  source 1..24: mol_type = other RNA; note = Antisense oligonucleotide
  modified_base 2: mod_base = OTHER; note = thymine
  modified_base 3: mod_base = OTHER; note = thymine
  modified_base 5: mod_base = OTHER; note = thymine
  modified_base 6: mod_base = OTHER; note = thymine
  modified_base 8: mod_base = OTHER; note = thymine
  modified_base 11: mod_base = OTHER; note = thymine
  modified_base 12: mod_base = OTHER; note = thymine
  modified_base 14: mod_base = OTHER; note = thymine
  modified_base 15: mod_base = OTHER; note = thymine
  modified_base 24: mod_base = OTHER; note = thymine
gttcttgtacttattcaacacaat

SEQ ID NO: 224 - RNA, 24 nt, synthetic construct
  source 1..24: mol_type = other RNA; note = Antisense oligonucleotide
  modified_base 1: mod_base = OTHER; note = thymine
  modified_base 3: mod_base = OTHER; note = thymine
  modified_base 5: mod_base = OTHER; note = thymine
  modified_base 6: mod_base = OTHER; note = thymine
  modified_base 10: mod_base = OTHER; note = thymine
  modified_base 13: mod_base = OTHER; note = thymine
  modified_base 15: mod_base = OTHER; note = thymine
  modified_base 16: mod_base = OTHER; note = thymine
  modified_base 18: mod_base = OTHER; note = thymine
  modified_base 21: mod_base = OTHER; note = thymine
  modified_base 22: mod_base = OTHER; note = thymine
tgtgttgaatcctcttgtacttca

SEQ ID NO: 225 - RNA, 24 nt, synthetic construct
  source 1..24: mol_type = other RNA; note = Antisense oligonucleotide
  modified_base 1: mod_base = OTHER; note = thymine
  modified_base 3: mod_base = OTHER; note = thymine
  modified_base 5: mod_base = OTHER; note = thymine
  modified_base 6: mod_base = OTHER; note = thymine
  modified_base 10: mod_base = OTHER; note = thymine
  modified_base 13: mod_base = OTHER; note = thymine
  modified_base 14: mod_base = OTHER; note = thymine
  modified_base 16: mod_base = OTHER; note = thymine
  modified_base 17: mod_base = OTHER; note = thymine
  modified_base 19: mod_base = OTHER; note = thymine
  modified_base 22: mod_base = OTHER; note = thymine
  modified_base 23: mod_base = OTHER; note = thymine
tgtgttgaatccttcttgtacttc

SEQ ID NO: 226 - RNA, 24 nt, synthetic construct
  source 1..24: mol_type = other RNA; note = Antisense oligonucleotide
  modified_base 1: mod_base = OTHER; note = thymine
  modified_base 3: mod_base = OTHER; note = thymine
  modified_base 5: mod_base = OTHER; note = thymine
  modified_base 6: mod_base = OTHER; note = thymine
  modified_base 10: mod_base = OTHER; note = thymine
  modified_base 14: mod_base = OTHER; note = thymine
  modified_base 15: mod_base = OTHER; note = thymine
  modified_base 17: mod_base = OTHER; note = thymine
  modified_base 18: mod_base = OTHER; note = thymine
  modified_base 20: mod_base = OTHER; note = thymine
  modified_base 23: mod_base = OTHER; note = thymine
  modified_base 24: mod_base = OTHER; note = thymine
tgtgttgaatccgttcttgtactt

SEQ ID NO: 227 - RNA, 24 nt, synthetic construct
  source 1..24: mol_type = other RNA; note = Antisense oligonucleotide
  modified_base 1: mod_base = OTHER; note = thymine
  modified_base 2: mod_base = OTHER; note = thymine
  modified_base 4: mod_base = OTHER; note = thymine
  modified_base 6: mod_base = OTHER; note = thymine
  modified_base 7: mod_base = OTHER; note = thymine
  modified_base 11: mod_base = OTHER; note = thymine
  modified_base 13: mod_base = OTHER; note = thymine
  modified_base 15: mod_base = OTHER; note = thymine
  modified_base 16: mod_base = OTHER; note = thymine
  modified_base 18: mod_base = OTHER; note = thymine
  modified_base 21: mod_base = OTHER; note = thymine
  modified_base 22: mod_base = OTHER; note = thymine
ttgtgttgaatctcttgtacttca

SEQ ID NO: 228 - RNA, 24 nt, synthetic construct
  source 1..24: mol_type = other RNA; note = Antisense oligonucleotide
  modified_base 1: mod_base = OTHER; note = thymine
  modified_base 2: mod_base = OTHER; note = thymine
  modified_base 4: mod_base = OTHER; note = thymine
  modified_base 6: mod_base = OTHER; note = thymine
  modified_base 7: mod_base = OTHER; note = thymine
  modified_base 11: mod_base = OTHER; note = thymine
  modified_base 13: mod_base = OTHER; note = thymine
  modified_base 14: mod_base = OTHER; note = thymine
  modified_base 16: mod_base = OTHER; note = thymine
  modified_base 17: mod_base = OTHER; note = thymine
  modified_base 19: mod_base = OTHER; note = thymine
  modified_base 22: mod_base = OTHER; note = thymine
  modified_base 23: mod_base = OTHER; note = thymine
ttgtgttgaatcttcttgtacttc

SEQ ID NO: 229 - RNA, 24 nt, synthetic construct
  source 1..24: mol_type = other RNA; note = Antisense oligonucleotide
  modified_base 1: mod_base = OTHER; note = thymine
  modified_base 2: mod_base = OTHER; note = thymine
  modified_base 4: mod_base = OTHER; note = thymine
  modified_base 6: mod_base = OTHER; note = thymine
  modified_base 7: mod_base = OTHER; note = thymine
  modified_base 11: mod_base = OTHER; note = thymine
  modified_base 14: mod_base = OTHER; note = thymine
  modified_base 15: mod_base = OTHER; note = thymine
  modified_base 17: mod_base = OTHER; note = thymine
  modified_base 18: mod_base = OTHER; note = thymine
  modified_base 20: mod_base = OTHER; note = thymine
  modified_base 23: mod_base = OTHER; note = thymine
  modified_base 24: mod_base = OTHER; note = thymine
ttgtgttgaatcgttcttgtactt

SEQ ID NO: 230 - RNA, 24 nt, synthetic construct
  source 1..24: mol_type = other RNA; note = Antisense oligonucleotide
  modified_base 2: mod_base = OTHER; note = thymine
  modified_base 3: mod_base = OTHER; note = thymine
  modified_base 12: mod_base = OTHER; note = thymine
  modified_base 13: mod_base = OTHER; note = thymine
  modified_base 15: mod_base = OTHER; note = thymine
  modified_base 16: mod_base = OTHER; note = thymine
  modified_base 18: mod_base = OTHER; note = thymine
  modified_base 21: mod_base = OTHER; note = thymine
  modified_base 22: mod_base = OTHER; note = thymine
attcaacacaattcttgtacttca

SEQ ID NO: 231 - RNA, 18 nt, synthetic construct
  source 1..18: mol_type = other RNA; note = Antisense oligonucleotide
  modified_base 1: mod_base = OTHER; note = thymine
  modified_base 3: mod_base = OTHER; note = thymine
  modified_base 4: mod_base = OTHER; note = thymine
  modified_base 6: mod_base = OTHER; note = thymine
  modified_base 9: mod_base = OTHER; note = thymine
  modified_base 12: mod_base = OTHER; note = thymine
  modified_base 13: mod_base = OTHER; note = thymine
  modified_base 16: mod_base = OTHER; note = thymine
tgttcttgtacttcatcc

SEQ ID NO: 232 - RNA, 18 nt, synthetic construct
  source 1..18: mol_type = other RNA; note = Antisense oligonucleotide
  modified_base 1: mod_base = OTHER; note = thymine
  modified_base 3: mod_base = OTHER; note = thymine
  modified_base 4: mod_base = OTHER; note = thymine
  modified_base 6: mod_base = OTHER; note = thymine
  modified_base 16: mod_base = OTHER; note = thymine
tgttcttgtacttcatcc

SEQ ID NO: 233 - RNA, 14 nt, synthetic construct
  source 1..14: mol_type = other RNA; note = Antisense oligonucleotide
  modified_base 1: mod_base = OTHER; note = thymine
  modified_base 4: mod_base = OTHER; note = thymine
  modified_base 10: mod_base = OTHER; note = thymine
  modified_base 13: mod_base = OTHER; note = thymine
  modified_base 14: mod_base = OTHER; note = thymine
tcatcccactgatt

SEQ ID NO: 234 - RNA, 16 nt, synthetic construct
  source 1..16: mol_type = other RNA; note = Antisense oligonucleotide
  modified_base 1: mod_base = OTHER; note = thymine
  modified_base 4: mod_base = OTHER; note = thymine
  modified_base 10: mod_base = OTHER; note = thymine
  modified_base 13: mod_base = OTHER; note = thymine
  modified_base 14: mod_base = OTHER; note = thymine
  modified_base 16: mod_base = OTHER; note = thymine
tcatcccactgattct

SEQ ID NO: 235 - RNA, 20 nt, synthetic construct
  source 1..20: mol_type = other RNA; note = Antisense oligonucleotide
  modified_base 1: mod_base = OTHER; note = thymine
  modified_base 4: mod_base = OTHER; note = thymine
  modified_base 10: mod_base = OTHER; note = thymine
  modified_base 13: mod_base = OTHER; note = thymine
  modified_base 14: mod_base = OTHER; note = thymine
  modified_base 16: mod_base = OTHER; note = thymine
  modified_base 20: mod_base = OTHER; note = thymine
tcatcccactgattctgaat

SEQ ID NO: 236 - RNA, 22 nt, synthetic construct
  source 1..22: mol_type = other RNA; note = Antisense oligonucleotide
  modified_base 1: mod_base = OTHER; note = thymine
  modified_base 4: mod_base = OTHER; note = thymine
  modified_base 10: mod_base = OTHER; note = thymine
  modified_base 13: mod_base = OTHER; note = thymine
  modified_base 14: mod_base = OTHER; note = thymine
  modified_base 16: mod_base = OTHER; note = thymine
  modified_base 20: mod_base = OTHER; note = thymine
  modified_base 21: mod_base = OTHER; note = thymine
tcatcccactgattctgaattc

SEQ ID NO: 237 - RNA, 14 nt, synthetic construct
  source 1..14: mol_type = other RNA; note = Antisense oligonucleotide
  modified_base 6: mod_base = OTHER; note = thymine
  modified_base 9: mod_base = OTHER; note = thymine
  modified_base 10: mod_base = OTHER; note = thymine
  modified_base 12: mod_base = OTHER; note = thymine
cccactgattctga

SEQ ID NO: 238 - RNA, 16 nt, synthetic construct
  source 1..16: mol_type = other RNA; note = Antisense oligonucleotide
  modified_base 2: mod_base = OTHER; note = thymine
  modified_base 8: mod_base = OTHER; note = thymine
  modified_base 11: mod_base = OTHER; note = thymine
  modified_base 12: mod_base = OTHER; note = thymine
  modified_base 14: mod_base = OTHER; note = thymine
atcccactgattctga

SEQ ID NO: 239 - RNA, 20 nt, synthetic construct
  source 1..20: mol_type = other RNA; note = Antisense oligonucleotide
  modified_base 2: mod_base = OTHER; note = thymine
  modified_base 3: mod_base = OTHER; note = thymine
  modified_base 6: mod_base = OTHER; note = thymine
  modified_base 12: mod_base = OTHER; note = thymine
  modified_base 15: mod_base = OTHER; note = thymine
  modified_base 16: mod_base = OTHER; note = thymine
  modified_base 18: mod_base = OTHER; note = thymine
cttcatcccactgattctga

SEQ ID NO: 240 - RNA, 22 nt, synthetic construct
  source 1..22: mol_type = other RNA; note = Antisense oligonucleotide
  modified_base 1: mod_base = OTHER; note = thymine
  modified_base 4: mod_base = OTHER; note = thymine
  modified_base 5: mod_base = OTHER; note = thymine
  modified_base 8: mod_base = OTHER; note = thymine
  modified_base 14: mod_base = OTHER; note = thymine
  modified_base 17: mod_base = OTHER; note = thymine
  modified_base 18: mod_base = OTHER; note = thymine
  modified_base 20: mod_base = OTHER; note = thymine
tacttcatcccactgattctga

SEQ ID NO: 241 - RNA, 14 nt, synthetic construct
  source 1..14: mol_type = other RNA; note = Antisense oligonucleotide
  modified_base 2: mod_base = OTHER; note = thymine
  modified_base 8: mod_base = OTHER; note = thymine
  modified_base 11: mod_base = OTHER; note = thymine
  modified_base 12: mod_base = OTHER; note = thymine
  modified_base 14: mod_base = OTHER; note = thymine
atcccactgattct

SEQ ID NO: 242 - RNA, 16 nt, synthetic construct
  source 1..16: mol_type = other RNA; note = Antisense oligonucleotide
  modified_base 3: mod_base = OTHER; note = thymine
  modified_base 9: mod_base = OTHER; note = thymine
  modified_base 12: mod_base = OTHER; note = thymine
  modified_base 13: mod_base = OTHER; note = thymine
  modified_base 15: mod_base = OTHER; note = thymine
catcccactgattctg

SEQ ID NO: 243 - RNA, 20 nt, synthetic construct
  source 1..20: mol_type = other RNA; note = Antisense oligonucleotide
  modified_base 1: mod_base = OTHER; note = thymine
  modified_base 2: mod_base = OTHER; note = thymine
  modified_base 5: mod_base = OTHER; note = thymine
  modified_base 11: mod_base = OTHER; note = thymine
  modified_base 14: mod_base = OTHER; note = thymine
  modified_base 15: mod_base = OTHER; note = thymine
  modified_base 17: mod_base = OTHER; note = thymine
ttcatcccactgattctgaa

SEQ ID NO: 244 - RNA, 22 nt, synthetic construct
  source 1..22: mol_type = other RNA; note = Antisense oligonucleotide
  modified_base 2: mod_base = OTHER; note = thymine
  modified_base 3: mod_base = OTHER; note = thymine
  modified_base 6: mod_base = OTHER; note = thymine
  modified_base 12: mod_base = OTHER; note = thymine
  modified_base 15: mod_base = OTHER; note = thymine
  modified_base 16: mod_base = OTHER; note = thymine
  modified_base 18: mod_base = OTHER; note = thymine
  modified_base 22: mod_base = OTHER; note = thymine
cttcatcccactgattctgaat

SEQ ID NO: 245 - RNA, 18 nt, synthetic construct
  source 1..18: mol_type = other RNA; note = Antisense oligonucleotide
  modified_base 1: mod_base = OTHER; note = thymine
  modified_base 3: mod_base = OTHER; note = thymine
  modified_base 4: mod_base = OTHER; note = thymine
  modified_base 5: mod_base = OTHER; note = thymine
  modified_base 10: mod_base = OTHER; note = thymine
  modified_base 15: mod_base = OTHER; note = thymine
tctttcaactagaataaa

SEQ ID NO: 246 - RNA, 18 nt, synthetic construct
  source 1..18: mol_type = other RNA; note = Antisense oligonucleotide
  modified_base 1: mod_base = OTHER; note = thymine
  modified_base 2: mod_base = OTHER; note = thymine
  modified_base 4: mod_base = OTHER; note = thymine
  modified_base 5: mod_base = OTHER; note = thymine
  modified_base 6: mod_base = OTHER; note = thymine
  modified_base 11: mod_base = OTHER; note = thymine
  modified_base 16: mod_base = OTHER; note = thymine
ttctttcaactagaataa

SEQ ID NO: 247 - RNA, 18 nt, synthetic construct
  source 1..18: mol_type = other RNA; note = Antisense oligonucleotide
  modified_base 2: mod_base = OTHER; note = thymine
  modified_base 3: mod_base = OTHER; note = thymine
  modified_base 5: mod_base = OTHER; note = thymine
  modified_base 6: mod_base = OTHER; note = thymine
  modified_base 7: mod_base = OTHER; note = thymine
  modified_base 12: mod_base = OTHER; note = thymine
  modified_base 17: mod_base = OTHER; note = thymine
attctttcaactagaata

SEQ ID NO: 248 - RNA, 18 nt, synthetic construct
  source 1..18: mol_type = other RNA; note = Antisense oligonucleotide
  modified_base 3: mod_base = OTHER; note = thymine
  modified_base 4: mod_base = OTHER; note = thymine
  modified_base 6: mod_base = OTHER; note = thymine
  modified_base 7: mod_base = OTHER; note = thymine
  modified_base 8: mod_base = OTHER; note = thymine
  modified_base 13: mod_base = OTHER; note = thymine
  modified_base 18: mod_base = OTHER; note = thymine
aattctttcaactagaat

SEQ ID NO: 249 - RNA, 18 nt, synthetic construct
  source 1..18: mol_type = other RNA; note = Antisense oligonucleotide
  modified_base 1: mod_base = OTHER; note = thymine
  modified_base 5: mod_base = OTHER; note = thymine
  modified_base 6: mod_base = OTHER; note = thymine
  modified_base 8: mod_base = OTHER; note = thymine
  modified_base 9: mod_base = OTHER; note = thymine
  modified_base 10: mod_base = OTHER; note = thymine
  modified_base 15: mod_base = OTHER; note = thymine
tgaattctttcaactaga

SEQ ID NO: 250 - RNA, 18 nt, synthetic construct
  source 1..18: mol_type = other RNA; note = Antisense oligonucleotide
  modified_base 2: mod_base = OTHER; note = thymine
  modified_base 6: mod_base = OTHER; note = thymine
  modified_base 7: mod_base = OTHER; note = thymine
  modified_base 9: mod_base = OTHER; note = thymine
  modified_base 10: mod_base = OTHER; note = thymine
  modified_base 11: mod_base = OTHER; note = thymine
  modified_base 16: mod_base = OTHER; note = thymine
ctgaattctttcaactag

SEQ ID NO: 251 - RNA, 18 nt, synthetic construct
  source 1..18: mol_type = other RNA; note = Antisense oligonucleotide
  modified_base 1: mod_base = OTHER; note = thymine
  modified_base 3: mod_base = OTHER; note = thymine
  modified_base 7: mod_base = OTHER; note = thymine
  modified_base 8: mod_base = OTHER; note = thymine
  modified_base 10: mod_base = OTHER; note = thymine
  modified_base 11: mod_base = OTHER; note = thymine
  modified_base 12: mod_base = OTHER; note = thymine
  modified_base 17: mod_base = OTHER; note = thymine
tctgaattctttcaacta

SEQ ID NO: 252 - RNA, 18 nt, synthetic construct
  source 1..18: mol_type = other RNA; note = Antisense oligonucleotide
  modified_base 1: mod_base = OTHER; note = thymine
  modified_base 2: mod_base = OTHER; note = thymine
  modified_base 4: mod_base = OTHER; note = thymine
  modified_base 8: mod_base = OTHER; note = thymine
  modified_base 9: mod_base = OTHER; note = thymine
  modified_base 11: mod_base = OTHER; note = thymine
  modified_base 12: mod_base = OTHER; note = thymine
  modified_base 13: mod_base = OTHER; note = thymine
  modified_base 18: mod_base = OTHER; note = thymine
ttctgaattctttcaact

SEQ ID NO: 253 - RNA, 18 nt, synthetic construct
  source 1..18: mol_type = other RNA; note = Antisense oligonucleotide
  modified_base 3: mod_base = OTHER; note = thymine
  modified_base 4: mod_base = OTHER; note = thymine
  modified_base 6: mod_base = OTHER; note = thymine
  modified_base 10: mod_base = OTHER; note = thymine
  modified_base 11: mod_base = OTHER; note = thymine
  modified_base 13: mod_base = OTHER; note = thymine
  modified_base 14: mod_base = OTHER; note = thymine
  modified_base 15: mod_base = OTHER; note = thymine
gattctgaattctttcaa

SEQ ID NO: 254 - RNA, 18 nt, synthetic construct
  source 1..18: mol_type = other RNA; note = Antisense oligonucleotide
  modified_base 1: mod_base = OTHER; note = thymine
tcatcccactgattctga

SEQ ID NO: 255 - RNA, 18 nt, synthetic construct
  source 1..18: mol_type = other RNA; note = Antisense oligonucleotide
ttcttgtacttcatccca

SEQ ID NO: 256 - RNA, 18 nt, synthetic construct
  source 1..18: mol_type = other RNA; note = Antisense oligonucleotide
gttcttgtacttcatccc

SEQ ID NO: 257 - RNA, 18 nt, synthetic construct
  source 1..18: mol_type = other RNA; note = Antisense oligonucleotide
tgttcttgtacttcatcc

SEQ ID NO: 258 - RNA, 18 nt, synthetic construct
  source 1..18: mol_type = other RNA; note = Antisense oligonucleotide
  modified_base 1: mod_base = OTHER; note = thymine
tgttcttgtacttcatcc

SEQ ID NO: 259 - RNA, 18 nt, synthetic construct
  source 1..18: mol_type = other RNA; note = Antisense oligonucleotide
gtgttcttgtacttcatc

SEQ ID NO: 260 - RNA, 18 nt, synthetic construct
  source 1..18: mol_type = other RNA; note = Antisense oligonucleotide
  modified_base 2: mod_base = OTHER; note = thymine
  modified_base 17: mod_base = OTHER; note = thymine
gtgttcttgtacttcatc

SEQ ID NO: 261 - RNA, 18 nt, synthetic construct
  source 1..18: mol_type = other RNA; note = Antisense oligonucleotide
ggtgttcttgtacttcat

SEQ ID NO: 262 - RNA, 18 nt, synthetic construct
  source 1..18: mol_type = other RNA; note = Antisense oligonucleotide
aggtgttcttgtacttca

SEQ ID NO: 263 - RNA, 18 nt, synthetic construct
  source 1..18: mol_type = other RNA; note = Antisense oligonucleotide
agccattgtgttgaatcc

SEQ ID NO: 264 - RNA, 18 nt, synthetic construct
  source 1..18: mol_type = other RNA; note = Antisense oligonucleotide
  modified_base 1: mod_base = OTHER; note = thymine
  modified_base 3: mod_base = OTHER; note = thymine
  modified_base 16: mod_base = OTHER; note = thymine
tgttcttgtacttcatcc

SEQ ID NO: 265 - RNA, 15 nt, synthetic construct
  source 1..15: mol_type = other RNA; note = Antisense oligonucleotide
  modified_base 3: mod_base = OTHER; note = thymine
  modified_base 4: mod_base = OTHER; note = thymine
  modified_base 6: mod_base = OTHER; note = thymine
  modified_base 7: mod_base = OTHER; note = thymine
  modified_base 8: mod_base = OTHER; note = thymine
  modified_base 13: mod_base = OTHER; note = thymine
aattctttcaactag

SEQ ID NO: 266 - RNA, 16 nt, synthetic construct
  source 1..16: mol_type = other RNA; note = Antisense oligonucleotide
  modified_base 1: mod_base = OTHER; note = thymine
  modified_base 3: mod_base = OTHER; note = thymine
  modified_base 7: mod_base = OTHER; note = thymine
  modified_base 8: mod_base = OTHER; note = thymine
  modified_base 10: mod_base = OTHER; note = thymine
  modified_base 11: mod_base = OTHER; note = thymine
  modified_base 12: mod_base = OTHER; note = thymine
tctgaattctttcaac

SEQ ID NO: 267 - RNA, 15 nt, synthetic construct
  source 1..15: mol_type = other RNA; note = Antisense oligonucleotide
  modified_base 1: mod_base = OTHER; note = thymine
  modified_base 3: mod_base = OTHER; note = thymine
  modified_base 7: mod_base = OTHER; note = thymine
  modified_base 8: mod_base = OTHER; note = thymine
  modified_base 10: mod_base = OTHER; note = thymine
  modified_base 11: mod_base = OTHER; note = thymine
  modified_base 12: mod_base = OTHER; note = thymine
tctgaattctttcaa

SEQ ID NO: 268 - RNA, 15 nt, synthetic construct
  source 1..15: mol_type = other RNA; note = Antisense oligonucleotide
  modified_base 2: mod_base = OTHER; note = thymine
  modified_base 6: mod_base = OTHER; note = thymine
  modified_base 7: mod_base = OTHER; note = thymine
  modified_base 9: mod_base = OTHER; note = thymine
  modified_base 10: mod_base = OTHER; note = thymine
  modified_base 11: mod_base = OTHER; note = thymine
ctgaattctttcaac

SEQ ID NO: 269 - RNA, 15 nt, synthetic construct
  source 1..15: mol_type = other RNA; note = Antisense oligonucleotide
  modified_base 1: mod_base = OTHER; note = thymine
  modified_base 5: mod_base = OTHER; note = thymine
  modified_base 6: mod_base = OTHER; note = thymine
  modified_base 8: mod_base = OTHER; note = thymine
  modified_base 9: mod_base = OTHER; note = thymine
  modified_base 10: mod_base = OTHER; note = thymine
  modified_base 15: mod_base = OTHER; note = thymine
tgaattctttcaact

SEQ ID NO: 270 - RNA, 15 nt, synthetic construct
  source 1..15: mol_type = other RNA; note = Antisense oligonucleotide
  modified_base 2: mod_base = OTHER; note = thymine
  modified_base 3: mod_base = OTHER; note = thymine
  modified_base 5: mod_base = OTHER; note = thymine
  modified_base 6: mod_base = OTHER; note = thymine
  modified_base 7: mod_base = OTHER; note = thymine
  modified_base 12: mod_base = OTHER; note = thymine
attctttcaactaga

SEQ ID NO: 271 - RNA, 17 nt, synthetic construct
  source 1..17: mol_type = other RNA; note = Antisense oligonucleotide
  modified_base 1: mod_base = OTHER; note = thymine
  modified_base 3: mod_base = OTHER; note = thymine
  modified_base 7: mod_base = OTHER; note = thymine
  modified_base 8: mod_base = OTHER; note = thymine
  modified_base 10: mod_base = OTHER; note = thymine
  modified_base 11: mod_base = OTHER; note = thymine
  modified_base 12: mod_base = OTHER; note = thymine
  modified_base 17: mod_base = OTHER; note = thymine
tctgaattctttcaact

SEQ ID NO: 272 - RNA, 17 nt, synthetic construct
  source 1..17: mol_type = other RNA; note = Antisense oligonucleotide
  modified_base 2: mod_base = OTHER; note = thymine
  modified_base 6: mod_base = OTHER; note = thymine
  modified_base 7: mod_base = OTHER; note = thymine
  modified_base 9: mod_base = OTHER; note = thymine
  modified_base 10: mod_base = OTHER; note = thymine
  modified_base 11: mod_base = OTHER; note = thymine
  modified_base 16: mod_base = OTHER; note = thymine
ctgaattctttcaacta

SEQ ID NO: 273 - RNA, 17 nt, synthetic construct
  source 1..17: mol_type = other RNA; note = Antisense oligonucleotide
  modified_base 1: mod_base = OTHER; note = thymine
  modified_base 5: mod_base = OTHER; note = thymine
  modified_base 6: mod_base = OTHER; note = thymine
  modified_base 8: mod_base = OTHER; note = thymine
  modified_base 9: mod_base = OTHER; note = thymine
  modified_base 10: mod_base = OTHER; note = thymine
  modified_base 15: mod_base = OTHER; note = thymine
tgaattctttcaactag

SEQ ID NO: 274 - RNA, 17 nt, synthetic construct
  source 1..17: mol_type = other RNA; note = Antisense oligonucleotide
  modified_base 4: mod_base = OTHER; note = thymine
  modified_base 5: mod_base = OTHER; note = thymine
  modified_base 7: mod_base = OTHER; note = thymine
  modified_base 8: mod_base = OTHER; note = thymine
  modified_base 9: mod_base = OTHER; note = thymine
  modified_base 14: mod_base = OTHER; note = thymine
gaattctttcaactaga

SEQ ID NO: 275 - RNA, 20 nt, synthetic construct
  source 1..20: mol_type = other RNA; note = Antisense oligonucleotide
  modified_base 1: mod_base = OTHER; note = thymine
  modified_base 3: mod_base = OTHER; note = thymine
  modified_base 7: mod_base = OTHER; note = thymine
  modified_base 8: mod_base = OTHER; note = thymine
  modified_base 10: mod_base = OTHER; note = thymine
  modified_base 11: mod_base = OTHER; note = thymine
  modified_base 12: mod_base = OTHER; note = thymine
  modified_base 17: mod_base = OTHER; note = thymine
tctgaattctttcaactaga

SEQ ID NO: 276 - RNA, 19 nt, synthetic construct
  source 1..19: mol_type = other RNA; note = Antisense oligonucleotide
  modified_base 1: mod_base = OTHER; note = thymine
  modified_base 3: mod_base = OTHER; note = thymine
  modified_base 7: mod_base = OTHER; note = thymine
  modified_base 8: mod_base = OTHER; note = thymine
  modified_base 10: mod_base = OTHER; note = thymine
  modified_base 11: mod_base = OTHER; note = thymine
  modified_base 12: mod_base = OTHER; note = thymine
  modified_base 17: mod_base = OTHER; note = thymine
tctgaattctttcaactag

SEQ ID NO: 277 - RNA, 19 nt, synthetic construct
  source 1..19: mol_type = other RNA; note = Antisense oligonucleotide
  modified_base 2: mod_base = OTHER; note = thymine
  modified_base 6: mod_base = OTHER; note = thymine
  modified_base 7: mod_base = OTHER; note = thymine
  modified_base 9: mod_base = OTHER; note = thymine
  modified_base 10: mod_base = OTHER; note = thymine
  modified_base 11: mod_base = OTHER; note = thymine
  modified_base 16: mod_base = OTHER; note = thymine
ctgaattctttcaactaga

SEQ ID NO: 278 - RNA, 20 nt, synthetic construct
  source 1..20: mol_type = other RNA; note = Antisense oligonucleotide
  modified_base 2: mod_base = OTHER; note = thymine
  modified_base 6: mod_base = OTHER; note = thymine
  modified_base 7: mod_base = OTHER; note = thymine
  modified_base 9: mod_base = OTHER; note = thymine
  modified_base 10: mod_base = OTHER; note = thymine
  modified_base 11: mod_base = OTHER; note = thymine
  modified_base 16: mod_base = OTHER; note = thymine
ctgaattctttcaactagaa

SEQ ID NO: 279 - RNA, 20 nt, synthetic construct
  source 1..20: mol_type = other RNA; note = Antisense oligonucleotide
  modified_base 1: mod_base = OTHER; note = thymine
  modified_base 2: mod_base = OTHER; note = thymine
  modified_base 4: mod_base = OTHER; note = thymine
  modified_base 8: mod_base = OTHER; note = thymine
  modified_base 9: mod_base = OTHER; note = thymine
  modified_base 11: mod_base = OTHER; note = thymine
  modified_base 12: mod_base = OTHER; note = thymine
  modified_base 13: mod_base = OTHER; note = thymine
  modified_base 18: mod_base = OTHER; note = thymine
ttctgaattctttcaactag

SEQ ID NO: 280 - RNA, 18 nt, synthetic construct
  source 1..18: mol_type = other RNA; note = Antisense oligonucleotide
  modified_base 1: mod_base = OTHER; note = thymine
  modified_base 3: mod_base = OTHER; note = thymine
tgttcttgtacttcatcc

SEQ ID NO: 281 - RNA, 18 nt, synthetic construct
  source 1..18: mol_type = other RNA; note = Antisense oligonucleotide
  modified_base 1: mod_base = OTHER; note = thymine
  modified_base 4: mod_base = OTHER; note = thymine
tgttcttgtacttcatcc

SEQ ID NO: 282 - RNA, 18 nt, synthetic construct
  source 1..18: mol_type = other RNA; note = Antisense oligonucleotide
  modified_base 1: mod_base = OTHER; note = thymine
  modified_base 6: mod_base = OTHER; note = thymine
tgttcttgtacttcatcc

SEQ ID NO: 283 - RNA, 18 nt, synthetic construct
  source 1..18: mol_type = other RNA; note = Antisense oligonucleotide
  modified_base 1: mod_base = OTHER; note = thymine
  modified_base 7: mod_base = OTHER; note = thymine
tgttcttgtacttcatcc

SEQ ID NO: 284 - RNA, 18 nt, synthetic construct
  source 1..18: mol_type = other RNA; note = Antisense oligonucleotide
  modified_base 1: mod_base = OTHER; note = thymine
  modified_base 9: mod_base = OTHER; note = thymine
tgttcttgtacttcatcc

SEQ ID NO: 285 - RNA, 18 nt, synthetic construct
  source 1..18: mol_type = other RNA; note = Antisense oligonucleotide
  modified_base 1: mod_base = OTHER; note = thymine
  modified_base 12: mod_base = OTHER; note = thymine
tgttcttgtacttcatcc

SEQ ID NO: 286 - RNA, 18 nt, synthetic construct
  source 1..18: mol_type = other RNA; note = Antisense oligonucleotide
  modified_base 1: mod_base = OTHER; note = thymine
  modified_base 13: mod_base = OTHER; note = thymine
tgttcttgtacttcatcc

SEQ ID NO: 287 - RNA, 18 nt, synthetic construct
  source 1..18: mol_type = other RNA; note = Antisense oligonucleotide
  modified_base 1: mod_base = OTHER; note = thymine
  modified_base 16: mod_base = OTHER; note = thymine
tgttcttgtacttcatcc

SEQ ID NO: 288 - RNA, 18 nt, synthetic construct
  source 1..18: mol_type = other RNA; note = Antisense oligonucleotide
  modified_base 1: mod_base = OTHER; note = thymine
  modified_base 3: mod_base = OTHER; note = thymine
  modified_base 4: mod_base = OTHER; note = thymine
  modified_base 16: mod_base = OTHER; note = thymine
tgttcttgtacttcatcc

SEQ ID NO: 289 - RNA, 18 nt, synthetic construct
  source 1..18: mol_type = other RNA; note = Antisense oligonucleotide
  modified_base 1: mod_base = OTHER; note = thymine
  modified_base 3: mod_base = OTHER; note = thymine
  modified_base 4: mod_base = OTHER; note = thymine
  modified_base 6: mod_base = OTHER; note = thymine
  modified_base 13: mod_base = OTHER; note = thymine
  modified_base 16: mod_base = OTHER; note = thymine
tgttcttgtacttcatcc

SEQ ID NO: 290 - RNA, 18 nt, synthetic construct
  source 1..18: mol_type = other RNA; note = Antisense oligonucleotide
  modified_base 1: mod_base = OTHER; note = thymine
  modified_base 3: mod_base = OTHER; note = thymine
  modified_base 4: mod_base = OTHER; note = thymine
  modified_base 6: mod_base = OTHER; note = thymine
  modified_base 7: mod_base = OTHER; note = thymine
  modified_base 12: mod_base = OTHER; note = thymine
  modified_base 13: mod_base = OTHER; note = thymine
  modified_base 16: mod_base = OTHER; note = thymine
tgttcttgtacttcatcc

SEQ ID NO: 291 - RNA, 18 nt, synthetic construct
  source 1..18: mol_type = other RNA; note = Antisense oligonucleotide
  modified_base 9: mod_base = OTHER; note = thymine
tgttcttgtacttcatcc

SEQ ID NO: 292 - RNA, 16 nt, synthetic construct
  source 1..16: mol_type = other RNA; note = Antisense oligonucleotide
  modified_base 3: mod_base = OTHER; note = thymine
  modified_base 5: mod_base = OTHER; note = thymine
  modified_base 6: mod_base = OTHER; note = thymine
  modified_base 8: mod_base = OTHER; note = thymine
  modified_base 9: mod_base = OTHER; note = thymine
  modified_base 14: mod_base = OTHER; note = thymine
  modified_base 15: mod_base = OTHER; note = thymine
ggtgttcttgtacttc

SEQ ID NO: 293 - RNA, 16 nt, synthetic construct
  source 1..16: mol_type = other RNA; note = Antisense oligonucleotide
  modified_base 1: mod_base = OTHER; note = thymine
  modified_base 3: mod_base = OTHER; note = thymine
  modified_base 4: mod_base = OTHER; note = thymine
  modified_base 6: mod_base = OTHER; note = thymine
  modified_base 7: mod_base = OTHER; note = thymine
  modified_base 12: mod_base = OTHER; note = thymine
  modified_base 13: mod_base = OTHER; note = thymine
  modified_base 16: mod_base = OTHER; note = thymine
tgttcttgtacttcat

SEQ ID NO: 294 - RNA, 20 nt, synthetic construct
  source 1..20: mol_type = other RNA; note = Antisense oligonucleotide
  modified_base 1: mod_base = OTHER; note = thymine
tctgaattctttcaactaga

SEQ ID NO: 295 - RNA, 16 nt, synthetic construct
  source 1..16: mol_type = other RNA; note = Antisense oligonucleotide
  modified_base 2: mod_base = OTHER; note = thymine
  modified_base 6: mod_base = OTHER; note = thymine
  modified_base 7: mod_base = OTHER; note = thymine
  modified_base 9: mod_base = OTHER; note = thymine
  modified_base 10: mod_base = OTHER; note = thymine
  modified_base 11: mod_base = OTHER; note = thymine
  modified_base 16: mod_base = OTHER; note = thymine
ctgaattctttcaact

SEQ ID NO: 296 - RNA, 16 nt, synthetic construct
  source 1..16: mol_type = other RNA; note = Antisense oligonucleotide
  modified_base 1: mod_base = OTHER; note = thymine
  modified_base 5: mod_base = OTHER; note = thymine
  modified_base 6: mod_base = OTHER; note = thymine
  modified_base 8: mod_base = OTHER; note = thymine
  modified_base 9: mod_base = OTHER; note = thymine
  modified_base 10: mod_base = OTHER; note = thymine
  modified_base 15: mod_base = OTHER; note = thymine
tgaattctttcaacta

SEQ ID NO: 297 - RNA, 16 nt, synthetic construct
  source 1..16: mol_type = other RNA; note = Antisense oligonucleotide
  modified_base 4: mod_base = OTHER; note = thymine
  modified_base 5: mod_base = OTHER; note = thymine
  modified_base 7: mod_base = OTHER; note = thymine
  modified_base 8: mod_base = OTHER; note = thymine
  modified_base 9: mod_base = OTHER; note = thymine
  modified_base 14: mod_base = OTHER; note = thymine
gaattctttcaactag

SEQ ID NO: 298 - RNA, 16 nt, synthetic construct
  source 1..16: mol_type = other RNA; note = Antisense oligonucleotide
  modified_base 3: mod_base = OTHER; note = thymine
  modified_base 4: mod_base = OTHER; note = thymine
  modified_base 6: mod_base = OTHER; note = thymine
  modified_base 7: mod_base = OTHER; note = thymine
  modified_base 8: mod_base = OTHER; note = thymine
  modified_base 13: mod_base = OTHER; note = thymine
aattctttcaactaga

SEQ ID NO: 299 - RNA, 18 nt, synthetic construct
  source 1..18: mol_type = other RNA; note = Antisense oligonucleotide
ctgaattctttcaactag

SEQ ID NO: 300 - RNA, 18 nt, synthetic construct
  source 1..18: mol_type = other RNA; note = Antisense oligonucleotide
  modified_base 2: mod_base = OTHER; note = thymine
ctgaattctttcaactag

SEQ ID NO: 301 - RNA, 20 nt, synthetic construct
  source 1..20: mol_type = other RNA; note = Antisense oligonucleotide
tctgaattctttcaactaga

SEQ ID NO: 302 - RNA, 18 nt, synthetic construct
  source 1..18: mol_type = other RNA; note = Antisense oligonucleotide
  modified_base 6: mod_base = OTHER; note = thymine
  modified_base 7: mod_base = OTHER; note = thymine
  modified_base 9: mod_base = OTHER; note = thymine
  modified_base 10: mod_base = OTHER; note = thymine
  modified_base 11: mod_base = OTHER; note = thymine
  modified_base 16: mod_base = OTHER; note = thymine
ctgaattctttcaactag

SEQ ID NO: 303 - RNA, 18 nt, synthetic construct
  source 1..18: mol_type = other RNA; note = Antisense oligonucleotide
  modified_base 2: mod_base = OTHER; note = thymine
  modified_base 6: mod_base = OTHER; note = thymine
  modified_base 7: mod_base = OTHER; note = thymine
  modified_base 9: mod_base = OTHER; note = thymine
  modified_base 16: mod_base = OTHER; note = thymine
ctgaattctttcaactag

SEQ ID NO: 304 - RNA, 18 nt, synthetic construct
  source 1..18: mol_type = other RNA; note = Antisense oligonucleotide
  modified_base 6: mod_base = OTHER; note = thymine
  modified_base 7: mod_base = OTHER; note = thymine
  modified_base 9: mod_base = OTHER; note = thymine
  modified_base 16: mod_base = OTHER; note = thymine
ctgaattctttcaactag

SEQ ID NO: 305 - RNA, 18 nt, synthetic construct
  source 1..18: mol_type = other RNA; note = Antisense oligonucleotide
  modified_base 16: mod_base = OTHER; note = thymine
ctgaattctttcaactag

SEQ ID NO: 306 - RNA, 18 nt, synthetic construct
  source 1..18: mol_type = other RNA; note = Antisense oligonucleotide
  modified_base 2: mod_base = OTHER; note = thymine
  modified_base 9: mod_base = OTHER; note = thymine
  modified_base 10: mod_base = OTHER; note = thymine
  modified_base 11: mod_base = OTHER; note = thymine
  modified_base 16: mod_base = OTHER; note = thymine
ctgaattctttcaactag

SEQ ID NO: 307 - RNA, 18 nt, synthetic construct
  source 1..18: mol_type = other RNA; note = Antisense oligonucleotide
  modified_base 2: mod_base = OTHER; note = thymine
  modified_base 6: mod_base = OTHER; note = thymine
  modified_base 9: mod_base = OTHER; note = thymine
  modified_base 10: mod_base = OTHER; note = thymine
  modified_base 11: mod_base = OTHER; note = thymine
  modified_base 16: mod_base = OTHER; note = thymine
ctgaattctttcaactag

SEQ ID NO: 308 - RNA, 15 nt, synthetic construct
  source 1..15: mol_type = other RNA; note = Antisense oligonucleotide
  modified_base 3: mod_base = OTHER; note = thymine
  modified_base 4: mod_base = OTHER; note = thymine
  modified_base 6: mod_base = OTHER; note = thymine
  modified_base 7: mod_base = OTHER; note = thymine
  modified_base 8: mod_base = OTHER; note = thymine
aattctttcaactag

SEQ ID NO: 309 - RNA, 15 nt, synthetic construct
  source 1..15: mol_type = other RNA; note = Antisense oligonucleotide
aattctttcaactag

SEQ ID NO: 310 - RNA, 15 nt, synthetic construct
  source 1..15: mol_type = other RNA; note = Antisense oligonucleotide
  modified_base 3: mod_base = OTHER; note = thymine
aattctttcaactag

SEQ ID NO: 311 - RNA, 15 nt, synthetic construct
  source 1..15: mol_type = other RNA; note = Antisense oligonucleotide
  modified_base 13: mod_base = OTHER; note = thymine
aattctttcaactag

SEQ ID NO: 312 - RNA, 18 nt, synthetic construct
  source 1..18: mol_type = other RNA; note = Antisense oligonucleotide
  modified_base 6: mod_base = OTHER; note = thymine
  modified_base 7: mod_base = OTHER; note = thymine
  modified_base 9: mod_base = OTHER; note = thymine
  modified_base 10: mod_base = OTHER; note = thymine
  modified_base 11: mod_base = OTHER; note = thymine
ctgaattctttcaactag

SEQ ID NO: 313 - RNA, 18 nt, synthetic construct
  source 1..18: mol_type = other RNA; note = Antisense oligonucleotide
  modified_base 7: mod_base = OTHER; note = thymine
  modified_base 9: mod_base = OTHER; note = thymine
  modified_base 10: mod_base = OTHER; note = thymine
  modified_base 11: mod_base = OTHER; note = thymine
ctgaattctttcaactag

SEQ ID NO: 314 - RNA, 18 nt, synthetic construct
  source 1..18: mol_type = other RNA; note = Antisense oligonucleotide
  modified_base 9: mod_base = OTHER; note = thymine
  modified_base 10: mod_base = OTHER; note = thymine
  modified_base 11: mod_base = OTHER; note = thymine
ctgaattctttcaactag

SEQ ID NO: 315 - RNA, 18 nt, synthetic construct
  source 1..18: mol_type = other RNA; note = Antisense oligonucleotide
  modified_base 9: mod_base = OTHER; note = thymine
  modified_base 10: mod_base = OTHER; note = thymine
ctgaattctttcaactag

SEQ ID NO: 316 - RNA, 18 nt, synthetic construct
  source 1..18: mol_type = other RNA; note = Antisense oligonucleotide
  modified_base 2: mod_base = OTHER; note = thymine
  modified_base 6: mod_base = OTHER; note = thymine
  modified_base 10: mod_base = OTHER; note = thymine
  modified_base 16: mod_base = OTHER; note = thymine
ctgaattctttcaactag

SEQ ID NO: 317 - RNA, 18 nt, synthetic construct
  source 1..18: mol_type = other RNA; note = Antisense oligonucleotide
  modified_base 7: mod_base = OTHER; note = thymine
  modified_base 9: mod_base = OTHER; note = thymine
  modified_base 11: mod_base = OTHER; note = thymine
ctgaattctttcaactag

SEQ ID NO: 318 - RNA, 18 nt, synthetic construct
  source 1..18: mol_type = other RNA; note = Antisense oligonucleotide
  modified_base 7: mod_base = OTHER; note = thymine
  modified_base 11: mod_base = OTHER; note = thymine
  modified_base 16: mod_base = OTHER; note = thymine
ctgaattctttcaactag

SEQ ID NO: 319 - RNA, 18 nt, synthetic construct
  source 1..18: mol_type = other RNA; note = Antisense oligonucleotide
  modified_base 6: mod_base = OTHER; note = thymine
  modified_base 10: mod_base = OTHER; note = thymine
  modified_base 11: mod_base = OTHER; note = thymine
  modified_base 16: mod_base = OTHER; note = thymine
ctgaattctttcaactag

SEQ ID NO: 320 - RNA, 18 nt, synthetic construct
  source 1..18: mol_type = other RNA; note = Antisense oligonucleotide
  modified_base 2: mod_base = OTHER; note = thymine
  modified_base 6: mod_base = OTHER; note = thymine
  modified_base 7: mod_base = OTHER; note = thymine
  modified_base 11: mod_base = OTHER; note = thymine
  modified_base 16: mod_base = OTHER; note = thymine
ctgaattctttcaactag

SEQ ID NO: 321 - RNA, 18 nt, synthetic construct
  source 1..18: mol_type = other RNA; note = Antisense oligonucleotide
  modified_base 2: mod_base = OTHER; note = thymine
  modified_base 6: mod_base = OTHER; note = thymine
  modified_base 7: mod_base = OTHER; note = thymine
  modified_base 16: mod_base = OTHER; note = thymine
ctgaattctttcaactag

SEQ ID NO: 322 - RNA, 18 nt, synthetic construct
  source 1..18: mol_type = other RNA; note = Antisense oligonucleotide
  modified_base 2: mod_base = OTHER; note = thymine
  modified_base 6: mod_base = OTHER; note = thymine
  modified_base 16: mod_base = OTHER; note = thymine
ctgaattctttcaactag

SEQ ID NO: 323 - RNA, 18 nt, synthetic construct
  source 1..18: mol_type = other RNA; note = Antisense oligonucleotide
  modified_base 2: mod_base = OTHER; note = thymine
  modified_base 16: mod_base = OTHER; note = thymine
ctgaattctttcaactag

SEQ ID NO: 324 - RNA, 19 nt, synthetic construct
  source 1..19: mol_type = other RNA; note = Antisense oligonucleotide
  modified_base 2: mod_base = OTHER; note = thymine
  modified_base 3: mod_base = OTHER; note = thymine
  modified_base 5: mod_base = OTHER; note = thymine
  modified_base 9: mod_base = OTHER; note = thymine
  modified_base 10: mod_base = OTHER; note = thymine
  modified_base 12: mod_base = OTHER; note = thymine
  modified_base 13: mod_base = OTHER; note = thymine
  modified_base 14: mod_base = OTHER; note = thymine
  modified_base 19: mod_base = OTHER; note = thymine
attctgaattctttcaact

SEQ ID NO: 325 - RNA, 20 nt, synthetic construct
  source 1..20: mol_type = other RNA; note = Antisense oligonucleotide
  modified_base 3: mod_base = OTHER; note = thymine
  modified_base 4: mod_base = OTHER; note = thymine
  modified_base 6: mod_base = OTHER; note = thymine
  modified_base 10: mod_base = OTHER; note = thymine
  modified_base 11: mod_base = OTHER; note = thymine
  modified_base 13: mod_base = OTHER; note = thymine
  modified_base 14: mod_base = OTHER; note = thymine
  modified_base 15: mod_base = OTHER; note = thymine
  modified_base 20: mod_base = OTHER; note = thymine
gattctgaattctttcaact

SEQ ID NO: 326 - RNA, 21 nt, synthetic construct
  source 1..21: mol_type = other RNA; note = Antisense oligonucleotide
  modified_base 1: mod_base = OTHER; note = thymine
  modified_base 4: mod_base = OTHER; note = thymine
  modified_base 5: mod_base = OTHER; note = thymine
  modified_base 7: mod_base = OTHER; note = thymine
  modified_base 11: mod_base = OTHER; note = thymine
  modified_base 12: mod_base = OTHER; note = thymine
  modified_base 14: mod_base = OTHER; note = thymine
  modified_base 15: mod_base = OTHER; note = thymine
  modified_base 16: mod_base = OTHER; note = thymine
  modified_base 21: mod_base = OTHER; note = thymine
tgattctgaattctttcaact

SEQ ID NO: 327 - RNA, 22 nt, synthetic construct
  source 1..22: mol_type = other RNA; note = Antisense oligonucleotide
  modified_base 2: mod_base = OTHER; note = thymine
  modified_base 5: mod_base = OTHER; note = thymine
  modified_base 6: mod_base = OTHER; note = thymine
  modified_base 8: mod_base = OTHER; note = thymine
  modified_base 12: mod_base = OTHER; note = thymine
  modified_base 13: mod_base = OTHER; note = thymine
  modified_base 15: mod_base = OTHER; note = thymine
  modified_base 16: mod_base = OTHER; note = thymine
  modified_base 17: mod_base = OTHER; note = thymine
  modified_base 22: mod_base = OTHER; note = thymine
ctgattctgaattctttcaact

SEQ ID NO: 328 - RNA, 19 nt, synthetic construct
  source 1..19: mol_type = other RNA; note = Antisense oligonucleotide
  modified_base 3: mod_base = OTHER; note = thymine
  modified_base 4: mod_base = OTHER; note = thymine
  modified_base 6: mod_base = OTHER; note = thymine
  modified_base 10: mod_base = OTHER; note = thymine
  modified_base 11: mod_base = OTHER; note = thymine
  modified_base 13: mod_base = OTHER; note = thymine
  modified_base 14: mod_base = OTHER; note = thymine
  modified_base 15: mod_base = OTHER; note = thymine
gattctgaattctttcaac

SEQ ID NO: 329 - RNA, 20 nt, synthetic construct
  source 1..20: mol_type = other RNA; note = Antisense oligonucleotide
  modified_base 1: mod_base = OTHER; note = thymine
  modified_base 4: mod_base = OTHER; note = thymine
  modified_base 5: mod_base = OTHER; note = thymine
  modified_base 7: mod_base = OTHER; note = thymine
  modified_base 11: mod_base = OTHER; note = thymine
  modified_base 12: mod_base = OTHER; note = thymine
  modified_base 14: mod_base = OTHER; note = thymine
  modified_base 15: mod_base = OTHER; note = thymine
  modified_base 16: mod_base = OTHER; note = thymine
tgattctgaattctttcaac

SEQ ID NO: 330 - RNA, 21 nt, synthetic construct
  source 1..21: mol_type = other RNA; note = Antisense oligonucleotide
  modified_base 2: mod_base = OTHER; note = thymine
  modified_base 5: mod_base = OTHER; note = thymine
  modified_base 6: mod_base = OTHER; note = thymine
  modified_base 8: mod_base = OTHER; note = thymine
  modified_base 12: mod_base = OTHER; note = thymine
  modified_base 13: mod_base = OTHER; note = thymine
  modified_base 15: mod_base = OTHER; note = thymine
  modified_base 16: mod_base = OTHER; note = thymine
  modified_base 17: mod_base = OTHER; note = thymine
ctgattctgaattctttcaac

SEQ ID NO: 331 - RNA, 22 nt, synthetic construct
  source 1..22: mol_type = other RNA; note = Antisense oligonucleotide
  modified_base 3: mod_base = OTHER; note = thymine
  modified_base 6: mod_base = OTHER; note = thymine
  modified_base 7: mod_base = OTHER; note = thymine
  modified_base 9: mod_base = OTHER; note = thymine
  modified_base 13: mod_base = OTHER; note = thymine
  modified_base 14: mod_base = OTHER; note = thymine
  modified_base 16: mod_base = OTHER; note = thymine
  modified_base 17: mod_base = OTHER; note = thymine
  modified_base 18: mod_base = OTHER; note = thymine
actgattctgaattctttcaac

SEQ ID NO: 332 - RNA, 18 nt, synthetic construct
  source 1..18: mol_type = other RNA; note = Antisense oligonucleotide
  modified_base 1: mod_base = OTHER; note = sugar modification: 2'-O-methoxyethylribose; note = thymine; note = backbone modification: 5'-phosphorothioate
  modified_base 2: mod_base = OTHER; note = backbone modification: 5'-phosphorothioate; note = sugar modification: 2'-O-methoxyethylribose
  modified_base 3: mod_base = OTHER; note = backbone modification: 5'-phosphorothioate; note = sugar modification: 2'-O-methoxyethylribose
  modified_base 4: mod_base = OTHER; note = sugar modification: 2'-O-methoxyethylribose; note = backbone modification: 5'-phosphorothioate
  modified_base 5: mod_base = OTHER; note = thymine; note = sugar modification: 2'-O-methoxyethylribose; note = backbone modification: 5'-phosphorothioate
  modified_base 6: mod_base = OTHER; note = sugar modification: 2'-O-methoxyethylribose; note = backbone modification: 5'-phosphorothioate
  modified_base 7: mod_base = OTHER; mod_base = m5c; note = backbone modification: 5'-phosphorothioate; note = sugar modification: 2'-O-methoxyethylribose
  modified_base 8: mod_base = OTHER; note = backbone modification: 5'-phosphorothioate; note = thymine; note = sugar modification: 2'-O-methoxyethylribose
  modified_base 9: mod_base = OTHER; note = sugar modification: 2'-O-methoxyethylribose; note = backbone modification: 5'-phosphorothioate
  modified_base 10: mod_base = OTHER; note = backbone modification: 5'-phosphorothioate; note = sugar modification: 2'-O-methoxyethylribose
  modified_base 11: mod_base = OTHER; note = backbone modification: 5'-phosphorothioate; note = sugar modification: 2'-O-methoxyethylribose; note = thymine
  modified_base 12: mod_base = m5c; mod_base = OTHER; note = sugar modification: 2'-O-methoxyethylribose; note = backbone modification: 5'-phosphorothioate
  modified_base 13: mod_base = OTHER; note = sugar modification: 2'-O-methoxyethylribose; note = backbone modification: 5'-phosphorothioate; note = thymine
  modified_base 14: mod_base = OTHER; note = sugar modification: 2'-O-methoxyethylribose; note = backbone modification: 5'-phosphorothioate
  modified_base 15: mod_base = OTHER; note = backbone modification: 5'-phosphorothioate; note = sugar modification: 2'-O-methoxyethylribose
  modified_base 16: mod_base = OTHER; note = backbone modification: 5'-phosphorothioate; note = sugar modification: 2'-O-methoxyethylribose
  modified_base 17: mod_base = OTHER; note = sugar modification: 2'-O-methoxyethylribose; note = backbone modification: 5'-phosphorothioate
  modified_base 18: mod_base = OTHER; note = sugar modification: 2'-O-methoxyethylribose
taaatgctagtctggagg

SEQ ID NO: 333 - RNA, 18 nt, synthetic construct
  source 1..18: mol_type = other RNA; note = Antisense oligonucleotide
  modified_base 1: mod_base = OTHER; note = backbone modification: 5'-phosphorothioate; note = sugar modification: 2'-O-methoxyethylribose
  modified_base 2: mod_base = OTHER; note = sugar modification: 2'-O-methoxyethylribose; note = thymine; note = backbone modification: 5'-phosphorothioate
  modified_base 3: mod_base = OTHER; note = backbone modification: 5'-phosphorothioate; note = sugar modification: 2'-O-methoxyethylribose
  modified_base 4: mod_base = OTHER; note = backbone modification: 5'-phosphorothioate; note = sugar modification: 2'-O-methoxyethylribose
  modified_base 5: mod_base = OTHER; note = thymine; note = sugar modification: 2'-O-methoxyethylribose; note = backbone modification: 5'-phosphorothioate
  modified_base 6: mod_base = OTHER; note = backbone modification: 5'-phosphorothioate; note = sugar modification: 2'-O-methoxyethylribose
  modified_base 7: mod_base = OTHER; note = backbone modification: 5'-phosphorothioate; note = sugar modification: 2'-O-methoxyethylribose
  modified_base 8: mod_base = OTHER; note = sugar modification: 2'-O-methoxyethylribose; note = backbone modification: 5'-phosphorothioate
  modified_base 9: mod_base = OTHER; note = backbone modification: 5'-phosphorothioate; note = thymine; note = sugar modification: 2'-O-methoxyethylribose
  modified_base 10: mod_base = OTHER; note = backbone modification: 5'-phosphorothioate; note = sugar modification: 2'-O-methoxyethylribose
  modified_base 11: mod_base = OTHER; mod_base = m5c; note = sugar modification: 2'-O-methoxyethylribose; note = backbone modification: 5'-phosphorothioate
  modified_base 12: mod_base = OTHER; note = sugar modification: 2'-O-methoxyethylribose; note = thymine; note = backbone modification: 5'-phosphorothioate
  modified_base 13: mod_base = OTHER; note = backbone modification: 5'-phosphorothioate; note = sugar modification: 2'-O-methoxyethylribose
  modified_base 14: mod_base = OTHER; note = sugar modification: 2'-O-methoxyethylribose; note = backbone modification: 5'-phosphorothioate
  modified_base 15: mod_base = OTHER; note = backbone modification: 5'-phosphorothioate; note = sugar modification: 2'-O-methoxyethylribose; note = thymine
  modified_base 16: mod_base = OTHER; mod_base = m5c; note = sugar modification: 2'-O-methoxyethylribose; note = backbone modification: 5'-phosphorothioate
  modified_base 17: mod_base = OTHER; note = backbone modification: 5'-phosphorothioate; note = thymine; note = sugar modification: 2'-O-methoxyethylribose
  modified_base 18: mod_base = OTHER; note = sugar modification: 2'-O-methoxyethylribose
gtagtaaatgctagtctg

SEQ ID NO: 334 - RNA, 18 nt, synthetic construct
  source 1..18: mol_type = other RNA; note = Antisense oligonucleotide
  modified_base 1: mod_base = OTHER; note = sugar modification: 2'-O-methoxyethylribose; note = backbone modification: 5'-phosphorothioate
  modified_base 2: mod_base = OTHER; note = thymine; note = sugar modification: 2'-O-methoxyethylribose; note = backbone modification: 5'-phosphorothioate
  modified_base 3: mod_base = OTHER; note = backbone modification: 5'-phosphorothioate; note = sugar modification: 2'-O-methoxyethylribose
  modified_base 4: mod_base = OTHER; note = backbone modification: 5'-phosphorothioate; note = thymine; note = sugar modification: 2'-O-methoxyethylribose
  modified_base 5: mod_base = OTHER; note = sugar modification: 2'-O-methoxyethylribose; note = backbone modification: 5'-phosphorothioate
  modified_base 6: mod_base = OTHER; note = sugar modification: 2'-O-methoxyethylribose; note = backbone modification: 5'-phosphorothioate
  modified_base 7: mod_base = OTHER; note = sugar modification: 2'-O-methoxyethylribose; note = backbone modification: 5'-phosphorothioate; note = thymine
  modified_base 8: mod_base = OTHER; note = backbone modification: 5'-phosphorothioate; note = sugar modification: 2'-O-methoxyethylribose
  modified_base 9: mod_base = OTHER; note = backbone modification: 5'-phosphorothioate; note = sugar modification: 2'-O-methoxyethylribose
  modified_base 10: mod_base = OTHER; note = thymine; note = sugar modification: 2'-O-methoxyethylribose; note = backbone modification: 5'-phosphorothioate
  modified_base 11: mod_base = OTHER; note = sugar modification: 2'-O-methoxyethylribose; note = backbone modification: 5'-phosphorothioate
  modified_base 12: mod_base = OTHER; note = sugar modification: 2'-O-methoxyethylribose; note = backbone modification: 5'-phosphorothioate
  modified_base 13: mod_base = OTHER; note = sugar modification: 2'-O-methoxyethylribose; note = backbone modification: 5'-phosphorothioate
  modified_base 14: mod_base = OTHER; note = thymine; note = sugar modification: 2'-O-methoxyethylribose; note = backbone modification: 5'-phosphorothioate
  modified_base 15: mod_base = OTHER; note = backbone modification: 5'-phosphorothioate; note = sugar modification: 2'-O-methoxyethylribose
  modified_base 16: mod_base = m5c; mod_base = OTHER; note = sugar modification: 2'-O-methoxyethylribose; note = backbone modification: 5'-phosphorothioate
  modified_base 17: mod_base = OTHER; note = thymine; note = backbone modification: 5'-phosphorothioate; note = sugar modification: 2'-O-methoxyethylribose
  modified_base 18: mod_base = OTHER; note = sugar modification: 2'-O-methoxyethylribose
atatagtagtaaatgcta

SEQ ID NO: 335 - RNA, 18 nt, synthetic construct
  source 1..18: mol_type = other RNA; note = Antisense oligonucleotide
  modified_base 1: mod_base = OTHER; note = backbone modification: 5'-phosphorothioate; note = thymine; note = sugar modification: 2'-O-methoxyethylribose
  modified_base 2: mod_base = OTHER; note = backbone modification: 5'-phosphorothioate; note = sugar modification: 2'-O-methoxyethylribose
  modified_base 3: mod_base = OTHER; note = backbone modification: 5'-phosphorothioate; note = sugar modification: 2'-O-methoxyethylribose
  modified_base 4: mod_base = OTHER; note = backbone modification: 5'-phosphorothioate; note = sugar modification: 2'-O-methoxyethylribose
  modified_base 5: mod_base = OTHER; note = backbone modification: 5'-phosphorothioate; note = sugar modification: 2'-O-methoxyethylribose; note = thymine
  modified_base 6: mod_base = OTHER; note = sugar modification: 2'-O-methoxyethylribose; note = backbone modification: 5'-phosphorothioate
  modified_base 7: mod_base = OTHER; note = thymine; note = sugar modification: 2'-O-methoxyethylribose; note = backbone modification: 5'-phosphorothioate
  modified_base 8: mod_base = OTHER; note = sugar modification: 2'-O-methoxyethylribose; note = backbone modification: 5'-phosphorothioate
  modified_base 9: mod_base = OTHER; note = thymine; note = backbone modification: 5'-phosphorothioate; note = sugar modification: 2'-O-methoxyethylribose
  modified_base 10: mod_base = OTHER; note = sugar modification: 2'-O-methoxyethylribose; note = backbone modification: 5'-phosphorothioate
  modified_base 11: mod_base = OTHER; note = backbone modification: 5'-phosphorothioate; note = sugar modification: 2'-O-methoxyethylribose
  modified_base 12: mod_base = OTHER; note = sugar modification: 2'-O-methoxyethylribose; note = thymine; note = backbone modification: 5'-phosphorothioate
  modified_base 13: mod_base = OTHER; note = sugar modification: 2'-O-methoxyethylribose; note = backbone modification: 5'-phosphorothioate
  modified_base 14: mod_base = OTHER; note = sugar modification: 2'-O-methoxyethylribose; note = backbone modification: 5'-phosphorothioate
  modified_base 15: mod_base = OTHER; note = backbone modification: 5'-phosphorothioate; note = sugar modification: 2'-O-methoxyethylribose; note = thymine
  modified_base 16: mod_base = OTHER; note = backbone modification: 5'-phosphorothioate; note = sugar modification: 2'-O-methoxyethylribose
  modified_base 17: mod_base = OTHER; note = backbone modification: 5'-phosphorothioate; note = sugar modification: 2'-O-methoxyethylribose
  modified_base 18: mod_base = OTHER; note = sugar modification: 2'-O-methoxyethylribose
taaatatatagtagtaaa

SEQ ID NO: 336 - RNA, 18 nt, synthetic construct
  source 1..18: mol_type = other RNA; note = Antisense oligonucleotide
  modified_base 1: mod_base = OTHER; note = backbone modification: 5'-phosphorothioate; note = sugar modification: 2'-O-methoxyethylribose
  modified_base 2: mod_base = OTHER; note = sugar modification: 2'-O-methoxyethylribose; note = backbone modification: 5'-phosphorothioate
  modified_base 3: mod_base = OTHER; note = backbone modification: 5'-phosphorothioate; note = sugar modification: 2'-O-methoxyethylribose
  modified_base 4: mod_base = OTHER; note = sugar modification: 2'-O-methoxyethylribose; note = backbone modification: 5'-phosphorothioate
  modified_base 5: mod_base = OTHER; note = sugar modification: 2'-O-methoxyethylribose; note = backbone modification: 5'-phosphorothioate
  modified_base 6: mod_base = OTHER; note = sugar modification: 2'-O-methoxyethylribose; note = thymine; note = backbone modification: 5'-phosphorothioate
  modified_base 7: mod_base = OTHER; note = backbone modification: 5'-phosphorothioate; note = sugar modification: 2'-O-methoxyethylribose
  modified_base 8: mod_base = OTHER; note = backbone modification: 5'-phosphorothioate; note = sugar modification: 2'-O-methoxyethylribose
  modified_base 9: mod_base = OTHER; note = backbone modification: 5'-phosphorothioate; note = sugar modification: 2'-O-methoxyethylribose
  modified_base 10: mod_base = OTHER; note = backbone modification: 5'-phosphorothioate; note = thymine; note = sugar modification: 2'-O-methoxyethylribose
  modified_base 11: mod_base = OTHER; note = backbone modification: 5'-phosphorothioate; note = sugar modification: 2'-O-methoxyethylribose
  modified_base 12: mod_base = OTHER; note = sugar modification: 2'-O-methoxyethylribose; note = thymine; note = backbone modification: 5'-phosphorothioate
  modified_base 13: mod_base = OTHER; note = sugar modification: 2'-O-methoxyethylribose; note = backbone modification: 5'-phosphorothioate
  modified_base 14: mod_base = OTHER; note = sugar modification: 2'-O-methoxyethylribose; note = thymine; note = backbone modification: 5'-phosphorothioate
  modified_base 15: mod_base = OTHER; note = sugar modification: 2'-O-methoxyethylribose; note = backbone modification: 5'-phosphorothioate
  modified_base 16: mod_base = OTHER; note = sugar modification: 2'-O-methoxyethylribose; note = backbone modification: 5'-phosphorothioate
  modified_base 17: mod_base = OTHER; note = thymine; note = backbone modification: 5'-phosphorothioate; note = sugar modification: 2'-O-methoxyethylribose
  modified_base 18: mod_base = OTHER; note = sugar modification: 2'-O-methoxyethylribose
aaaaataaatatatagta

SEQ ID NO: 337 - RNA, 18 nt, synthetic construct
  source 1..18: mol_type = other RNA; note = Antisense oligonucleotide
  modified_base 1: mod_base = OTHER; note = backbone modification: 5'-phosphorothioate; note = sugar modification: 2'-O-methoxyethylribose
  modified_base 2: mod_base = OTHER; note = backbone modification: 5'-phosphorothioate; note = sugar modification: 2'-O-methoxyethylribose
  modified_base 3: mod_base = OTHER; note = backbone modification: 5'-phosphorothioate; note = sugar modification: 2'-O-methoxyethylribose
  modified_base 4: mod_base = OTHER; note = sugar modification: 2'-O-methoxyethylribose; note = backbone modification: 5'-phosphorothioate
  modified_base 5: mod_base = OTHER; note = sugar modification: 2'-O-methoxyethylribose; note = backbone modification: 5'-phosphorothioate
  modified_base 6: mod_base = OTHER; note = backbone modification: 5'-phosphorothioate; note = sugar modification: 2'-O-methoxyethylribose
  modified_base 7: mod_base = OTHER; note = backbone modification: 5'-phosphorothioate; note = sugar modification: 2'-O-methoxyethylribose
  modified_base 8: mod_base = OTHER; note = backbone modification: 5'-phosphorothioate; note = sugar modification: 2'-O-methoxyethylribose
  modified_base 9: mod_base = OTHER; note = sugar modification: 2'-O-methoxyethylribose; note = backbone modification: 5'-phosphorothioate
  modified_base 10: mod_base = OTHER; note = backbone modification: 5'-phosphorothioate; note = sugar modification: 2'-O-methoxyethylribose
  modified_base 11: mod_base = OTHER; note = sugar modification: 2'-O-methoxyethylribose; note = backbone modification: 5'-phosphorothioate; note = thymine
  modified_base 12: mod_base = OTHER; note = backbone modification: 5'-phosphorothioate; note = sugar modification: 2'-O-methoxyethylribose
  modified_base 13: mod_base = OTHER; note = backbone modification: 5'-phosphorothioate; note = sugar modification: 2'-O-methoxyethylribose
  modified_base 14: mod_base = OTHER; note = sugar modification: 2'-O-methoxyethylribose; note = backbone modification: 5'-phosphorothioate
  modified_base 15: mod_base = OTHER; note = sugar modification: 2'-O-methoxyethylribose; note = thymine; note = backbone modification: 5'-phosphorothioate
  modified_base 16: mod_base = OTHER; note = backbone modification: 5'-phosphorothioate; note = sugar modification: 2'-O-methoxyethylribose
  modified_base 17: mod_base = OTHER; note = thymine; note = backbone modification: 5'-phosphorothioate; note = sugar modification: 2'-O-methoxyethylribose
  modified_base 18: mod_base = OTHER; note = sugar modification: 2'-O-methoxyethylribose
aaaggaaaaataaatata

SEQ ID NO: 338 - RNA, 18 nt, synthetic construct
  source 1..18: mol_type = other RNA; note = Antisense oligonucleotide
  modified_base 1: mod_base = OTHER; note = sugar modification: 2'-O-methoxyethylribose; note = backbone modification: 5'-phosphorothioate
  modified_base 2: mod_base = OTHER; note = backbone modification: 5'-phosphorothioate; note = sugar modification: 2'-O-methoxyethylribose
  modified_base 3: mod_base = OTHER; note = backbone modification: 5'-phosphorothioate; note = sugar modification: 2'-O-methoxyethylribose
  modified_base 4: mod_base = OTHER; note = backbone modification: 5'-phosphorothioate; note = sugar modification: 2'-O-methoxyethylribose; note = thymine
  modified_base 5: mod_base = OTHER; note = backbone modification: 5'-phosphorothioate; note = sugar modification: 2'-O-methoxyethylribose
  modified_base 6: mod_base = OTHER; note = backbone modification: 5'-phosphorothioate; note = sugar modification: 2'-O-methoxyethylribose
  modified_base 7: mod_base = OTHER; note = sugar modification: 2'-O-methoxyethylribose; note = backbone modification: 5'-phosphorothioate
  modified_base 8: mod_base = OTHER; note = backbone modification: 5'-phosphorothioate; note = sugar modification: 2'-O-methoxyethylribose
  modified_base 9: mod_base = OTHER; note = sugar modification: 2'-O-methoxyethylribose; note = backbone modification: 5'-phosphorothioate
  modified_base 10: mod_base = OTHER; note = sugar modification: 2'-O-methoxyethylribose; note = backbone modification: 5'-phosphorothioate
  modified_base 11: mod_base = OTHER; note = sugar modification: 2'-O-methoxyethylribose; note = backbone modification: 5'-phosphorothioate
  modified_base 12: mod_base = OTHER; note = backbone modification: 5'-phosphorothioate; note = sugar modification: 2'-O-methoxyethylribose
  modified_base 13: mod_base = OTHER; note = backbone modification: 5'-phosphorothioate; note = sugar modification: 2'-O-methoxyethylribose
  modified_base 14: mod_base = OTHER; note = backbone modification: 5'-phosphorothioate; note = sugar modification: 2'-O-methoxyethylribose
  modified_base 15: mod_base = OTHER; note = backbone modification: 5'-phosphorothioate; note = sugar modification: 2'-O-methoxyethylribose
  modified_base 16: mod_base = OTHER; note = backbone modification: 5'-phosphorothioate; note = sugar modification: 2'-O-methoxyethylribose; note = thymine
  modified_base 17: mod_base = OTHER; note = sugar modification: 2'-O-methoxyethylribose; note = backbone modification: 5'-phosphorothioate
  modified_base 18: mod_base = OTHER; note = sugar modification: 2'-O-methoxyethylribose
gaataaaaggaaaaataa

SEQ ID NO: 339 - RNA, 18 nt, synthetic construct
  source 1..18: mol_type = other RNA; note = Antisense oligonucleotide
  modified_base 1: mod_base = OTHER; note = sugar modification: 2'-O-methoxyethylribose; note = backbone modification: 5'-phosphorothioate
  modified_base 2: mod_base = OTHER; note = sugar modification: 2'-O-methoxyethylribose; note = backbone modification: 5'-phosphorothioate
  modified_base 3: mod_base = OTHER; mod_base = m5c; note = sugar modification: 2'-O-methoxyethylribose; note = backbone modification: 5'-phosphorothioate
  modified_base 4: mod_base = OTHER; note = sugar modification: 2'-O-methoxyethylribose; note = thymine; note = backbone modification: 5'-phosphorothioate
  modified_base 5: mod_base = OTHER; note = backbone modification: 5'-phosphorothioate; note = sugar modification: 2'-O-methoxyethylribose
  modified_base 6: mod_base = OTHER; note = backbone modification: 5'-phosphorothioate; note = sugar modification: 2'-O-methoxyethylribose
  modified_base 7: mod_base = OTHER; note = sugar modification: 2'-O-methoxyethylribose; note = backbone modification: 5'-phosphorothioate
  modified_base 8: mod_base = OTHER; note = backbone modification: 5'-phosphorothioate; note = sugar modification: 2'-O-methoxyethylribose
  modified_base 9: mod_base = OTHER; note = backbone modification: 5'-phosphorothioate; note = thymine; note = sugar modification: 2'-O-methoxyethylribose
  modified_base 10: mod_base = OTHER; note = sugar modification: 2'-O-methoxyethylribose; note = backbone modification: 5'-phosphorothioate
  modified_base 11: mod_base = OTHER; note = sugar modification: 2'-O-methoxyethylribose; note = backbone modification: 5'-phosphorothioate
  modified_base 12: mod_base = OTHER; note = backbone modification: 5'-phosphorothioate; note = sugar modification: 2'-O-methoxyethylribose
  modified_base 13: mod_base = OTHER; note = sugar modification: 2'-O-methoxyethylribose; note = backbone modification: 5'-phosphorothioate
  modified_base 14: mod_base = OTHER; note = backbone modification: 5'-phosphorothioate; note = sugar modification: 2'-O-methoxyethylribose
  modified_base 15: mod_base = OTHER; note = sugar modification: 2'-O-methoxyethylribose; note = backbone modification: 5'-phosphorothioate
  modified_base 16: mod_base = OTHER; note = backbone modification: 5'-phosphorothioate; note = sugar modification: 2'-O-methoxyethylribose
  modified_base 17: mod_base = OTHER; note = sugar modification: 2'-O-methoxyethylribose; note = backbone modification: 5'-phosphorothioate
  modified_base 18: mod_base = OTHER; note = sugar modification: 2'-O-methoxyethylribose
aactagaataaaaggaaa

SEQ ID NO: 340 - RNA, 18 nt, synthetic construct
  source 1..18: mol_type = other RNA; note = Antisense oligonucleotide
  modified_base 1: mod_base = OTHER; mod_base = m5c; note = sugar modification: 2'-O-methoxyethylribose; note = backbone modification: 5'-phosphorothioate
  modified_base 2: mod_base = OTHER; note = thymine; note = backbone modification: 5'-phosphorothioate; note = sugar modification: 2'-O-methoxyethylribose
  modified_base 3: mod_base = OTHER; note = sugar modification: 2'-O-methoxyethylribose; note = thymine; note = backbone modification: 5'-phosphorothioate
  modified_base 4: mod_base = OTHER; note = thymine; note = backbone modification: 5'-phosphorothioate; note = sugar modification: 2'-O-methoxyethylribose
  modified_base 5: mod_base = OTHER; mod_base = m5c; note = backbone modification: 5'-phosphorothioate; note = sugar modification: 2'-O-methoxyethylribose
  modified_base 6: mod_base = OTHER; note = sugar modification: 2'-O-methoxyethylribose; note = backbone modification: 5'-phosphorothioate
  modified_base 7: mod_base = OTHER; note = backbone modification: 5'-phosphorothioate; note = sugar modification: 2'-O-methoxyethylribose
  modified_base 8: mod_base = m5c; mod_base = OTHER; note = sugar modification: 2'-O-methoxyethylribose; note = backbone modification: 5'-phosphorothioate
  modified_base 9: mod_base = OTHER; note = thymine; note = sugar modification: 2'-O-methoxyethylribose; note = backbone modification: 5'-phosphorothioate
  modified_base 10: mod_base = OTHER; note = sugar modification: 2'-O-methoxyethylribose; note = backbone modification: 5'-phosphorothioate
  modified_base 11: mod_base = OTHER; note = sugar modification: 2'-O-methoxyethylribose; note = backbone modification: 5'-phosphorothioate
  modified_base 12: mod_base = OTHER; note = backbone modification: 5'-phosphorothioate; note = sugar modification: 2'-O-methoxyethylribose
  modified_base 13: mod_base = OTHER; note = sugar modification: 2'-O-methoxyethylribose; note = backbone modification: 5'-phosphorothioate
  modified_base 14: mod_base = OTHER; note = sugar modification: 2'-O-methoxyethylribose; note = thymine; note = backbone modification: 5'-phosphorothioate
  modified_base 15: mod_base = OTHER; note = backbone modification: 5'-phosphorothioate; note = sugar modification: 2'-O-methoxyethylribose
  modified_base 16: mod_base = OTHER; note = sugar modification: 2'-O-methoxyethylribose; note = backbone modification: 5'-phosphorothioate
  modified_base 17: mod_base = OTHER; note = sugar modification: 2'-O-methoxyethylribose; note = backbone modification: 5'-phosphorothioate
  modified_base 18: mod_base = OTHER; note = sugar modification: 2'-O-methoxyethylribose
ctttcaactagaataaaa

SEQ ID NO: 341 - RNA, 18 nt, synthetic construct
  source 1..18: mol_type = other RNA; note = Antisense oligonucleotide
  modified_base 1: mod_base = OTHER; note = sugar modification: 2'-O-methoxyethylribose; note = backbone modification: 5'-phosphorothioate
  modified_base 2: mod_base = OTHER; note = backbone modification: 5'-phosphorothioate; note = sugar modification: 2'-O-methoxyethylribose
  modified_base 3: mod_base = OTHER; note = sugar modification: 2'-O-methoxyethylribose; note = backbone modification: 5'-phosphorothioate
  modified_base 4: mod_base = OTHER; note = sugar modification: 2'-O-methoxyethylribose; note = thymine; note = backbone modification: 5'-phosphorothioate
  modified_base 5: mod_base = OTHER; note = sugar modification: 2'-O-methoxyethylribose; note = thymine; note = backbone modification: 5'-phosphorothioate
  modified_base 6: mod_base = OTHER; mod_base = m5c; note = backbone modification: 5'-phosphorothioate; note = sugar modification: 2'-O-methoxyethylribose
  modified_base 7: mod_base = OTHER; note = backbone modification: 5'-phosphorothioate; note = sugar modification: 2'-O-methoxyethylribose; note = thymine
  modified_base 8: mod_base = OTHER; note = thymine; note = backbone modification: 5'-phosphorothioate; note = sugar modification: 2'-O-methoxyethylribose
  modified_base 9: mod_base = OTHER; note = sugar modification: 2'-O-methoxyethylribose; note = thymine; note = backbone modification: 5'-phosphorothioate
  modified_base 10: mod_base = m5c; mod_base = OTHER; note = sugar modification: 2'-O-methoxyethylribose; note = backbone modification: 5'-phosphorothioate
  modified_base 11: mod_base = OTHER; note = backbone modification: 5'-phosphorothioate; note = sugar modification: 2'-O-methoxyethylribose
  modified_base 12: mod_base = OTHER; note = backbone modification: 5'-phosphorothioate; note = sugar modification: 2'-O-methoxyethylribose
  modified_base 13: mod_base = OTHER; mod_base = m5c; note = sugar modification: 2'-O-methoxyethylribose; note = backbone modification: 5'-phosphorothioate
  modified_base 14: mod_base = OTHER; note = backbone modification: 5'-phosphorothioate; note = thymine; note = sugar modification: 2'-O-methoxyethylribose
  modified_base 15: mod_base = OTHER; note = backbone modification: 5'-phosphorothioate; note = sugar modification: 2'-O-methoxyethylribose
  modified_base 16: mod_base = OTHER; note = sugar modification: 2'-O-methoxyethylribose; note = backbone modification: 5'-phosphorothioate
  modified_base 17: mod_base = OTHER; note = sugar modification: 2'-O-methoxyethylribose; note = backbone modification: 5'-phosphorothioate
  modified_base 18: mod_base = OTHER; note = sugar modification: 2'-O-methoxyethylribose
gaattctttcaactagaa

SEQ ID NO: 342 - RNA, 18 nt, synthetic construct
  source 1..18: mol_type = other RNA; note = Antisense oligonucleotide
  modified_base 1: mod_base = OTHER; note = sugar modification: 2'-O-methoxyethylribose; note = backbone modification: 5'-phosphorothioate
  modified_base 2: mod_base = OTHER; note = thymine; note = sugar modification: 2'-O-methoxyethylribose; note = backbone modification: 5'-phosphorothioate
  modified_base 3: mod_base = OTHER; note = sugar modification: 2'-O-methoxyethylribose; note = thymine; note = backbone modification: 5'-phosphorothioate
  modified_base 4: mod_base = m5c; mod_base = OTHER; note = sugar modification: 2'-O-methoxyethylribose; note = backbone modification: 5'-phosphorothioate
  modified_base 5: mod_base = OTHER; note = thymine; note = sugar modification: 2'-O-methoxyethylribose; note = backbone modification: 5'-phosphorothioate
  modified_base 6: mod_base = OTHER; note = sugar modification: 2'-O-methoxyethylribose; note = backbone modification: 5'-phosphorothioate
  modified_base 7: mod_base = OTHER; note = sugar modification: 2'-O-methoxyethylribose; note = backbone modification: 5'-phosphorothioate
  modified_base 8: mod_base = OTHER; note = sugar modification: 2'-O-methoxyethylribose; note = backbone modification: 5'-phosphorothioate
  modified_base 9: mod_base = OTHER; note = thymine; note = sugar modification: 2'-O-methoxyethylribose; note = backbone modification: 5'-phosphorothioate
  modified_base 10: mod_base = OTHER; note = sugar modification: 2'-O-methoxyethylribose; note = thymine; note = backbone modification: 5'-phosphorothioate
  modified_base 11: mod_base = OTHER; mod_base = m5c; note = sugar modification: 2'-O-methoxyethylribose; note = backbone modification: 5'-phosphorothioate
  modified_base 12: mod_base = OTHER; note = sugar modification: 2'-O-methoxyethylribose; note = backbone modification: 5'-phosphorothioate; note = thymine
  modified_base 13: mod_base = OTHER; note = backbone modification: 5'-phosphorothioate; note = thymine; note = sugar modification: 2'-O-methoxyethylribose
  modified_base 14: mod_base = OTHER; note = backbone modification: 5'-phosphorothioate; note = sugar modification: 2'-O-methoxyethylribose; note = thymine
  modified_base 15: mod_base = m5c; mod_base = OTHER; note = backbone modification: 5'-phosphorothioate; note = sugar modification: 2'-O-methoxyethylribose
  modified_base 16: mod_base = OTHER; note = sugar modification: 2'-O-methoxyethylribose; note = backbone modification: 5'-phosphorothioate
  modified_base 17: mod_base = OTHER; note = backbone modification: 5'-phosphorothioate; note = sugar modification: 2'-O-methoxyethylribose
  modified_base 18: mod_base = m5c; mod_base = OTHER; note = sugar modification: 2'-O-methoxyethylribose
attctgaattctttcaac

SEQ ID NO: 343 - RNA, 18 nt, synthetic construct
  source 1..18: mol_type = other RNA; note = Antisense oligonucleotide
  modified_base 1: mod_base = OTHER; mod_base = m5c; note = backbone modification: 5'-phosphorothioate; note = sugar modification: 2'-O-methoxyethylribose
  modified_base 2: mod_base = OTHER; note = sugar modification: 2'-O-methoxyethylribose; note = backbone modification: 5'-phosphorothioate
  modified_base 3: mod_base = OTHER; mod_base = m5c; note = backbone modification: 5'-phosphorothioate; note = sugar modification: 2'-O-methoxyethylribose
  modified_base 4: mod_base = OTHER; note = sugar modification: 2'-O-methoxyethylribose; note = backbone modification: 5'-phosphorothioate; note = thymine
  modified_base 5: mod_base = OTHER; note = backbone modification: 5'-phosphorothioate; note = sugar modification: 2'-O-methoxyethylribose
  modified_base 6: mod_base = OTHER; note = backbone modification: 5'-phosphorothioate; note = sugar modification: 2'-O-methoxyethylribose
  modified_base 7: mod_base = OTHER; note = thymine; note = backbone modification: 5'-phosphorothioate; note = sugar modification: 2'-O-methoxyethylribose
  modified_base 8: mod_base = OTHER; note = sugar modification: 2'-O-methoxyethylribose; note = thymine; note = backbone modification: 5'-phosphorothioate
  modified_base 9: mod_base = m5c; mod_base = OTHER; note = sugar modification: 2'-O-methoxyethylribose; note = backbone modification: 5'-phosphorothioate
  modified_base 10: mod_base = OTHER; note = thymine; note = backbone modification: 5'-phosphorothioate; note = sugar modification: 2'-O-methoxyethylribose
  modified_base 11: mod_base = OTHER; note = sugar modification: 2'-O-methoxyethylribose; note = backbone modification: 5'-phosphorothioate
  modified_base 12: mod_base = OTHER; note = backbone modification: 5'-phosphorothioate; note = sugar modification: 2'-O-methoxyethylribose
  modified_base 13: mod_base = OTHER; note = backbone modification: 5'-phosphorothioate; note = sugar modification: 2'-O-methoxyethylribose
  modified_base 14: mod_base = OTHER; note = backbone modification: 5'-phosphorothioate; note = sugar modification: 2'-O-methoxyethylribose; note = thymine
  modified_base 15: mod_base = OTHER; note = sugar modification: 2'-O-methoxyethylribose; note = thymine; note = backbone modification: 5'-phosphorothioate
  modified_base 16: mod_base = m5c; mod_base = OTHER; note = backbone modification: 5'-phosphorothioate; note = sugar modification: 2'-O-methoxyethylribose
  modified_base 17: mod_base = OTHER; note = backbone modification: 5'-phosphorothioate; note = thymine; note = sugar modification: 2'-O-methoxyethylribose
  modified_base 18: mod_base = OTHER; note = thymine; note = sugar modification: 2'-O-methoxyethylribose
cactgattctgaattctt

SEQ ID NO: 344 - RNA, 18 nt, synthetic construct
  source 1..18: mol_type = other RNA; note = Antisense oligonucleotide
  modified_base 1: mod_base = OTHER; mod_base = m5c; note = backbone modification: 5'-phosphorothioate; note = sugar modification: 2'-O-methoxyethylribose
  modified_base 2: mod_base = OTHER; note = backbone modification: 5'-phosphorothioate; note = sugar modification: 2'-O-methoxyethylribose
  modified_base 3: mod_base = OTHER; note = sugar modification: 2'-O-methoxyethylribose; note = backbone modification: 5'-phosphorothioate; note = thymine
  modified_base 4: mod_base = m5c; mod_base = OTHER; note = sugar modification: 2'-O-methoxyethylribose; note = backbone modification: 5'-phosphorothioate
  modified_base 5: mod_base = OTHER; mod_base = m5c; note = sugar modification: 2'-O-methoxyethylribose; note = backbone modification: 5'-phosphorothioate
  modified_base 6: mod_base = m5c; mod_base = OTHER; note = sugar modification: 2'-O-methoxyethylribose; note = backbone modification: 5'-phosphorothioate
  modified_base 7: mod_base = OTHER; note = backbone modification: 5'-phosphorothioate; note = sugar modification: 2'-O-methoxyethylribose
  modified_base 8: mod_base = m5c; mod_base = OTHER; note = sugar modification: 2'-O-methoxyethylribose; note = backbone modification: 5'-phosphorothioate
  modified_base 9: mod_base = OTHER; note = thymine; note = sugar modification: 2'-O-methoxyethylribose; note = backbone modification: 5'-phosphorothioate
  modified_base 10: mod_base = OTHER; note = backbone modification: 5'-phosphorothioate; note = sugar modification: 2'-O-methoxyethylribose
  modified_base 11: mod_base = OTHER; note = backbone modification: 5'-phosphorothioate; note = sugar modification: 2'-O-methoxyethylribose
  modified_base 12: mod_base = OTHER; note = thymine; note = sugar modification: 2'-O-methoxyethylribose; note = backbone modification: 5'-phosphorothioate
  modified_base 13: mod_base = OTHER; note = thymine; note = sugar modification: 2'-O-methoxyethylribose; note = backbone modification: 5'-phosphorothioate
  modified_base 14: mod_base = OTHER; mod_base = m5c; note = backbone modification: 5'-phosphorothioate; note = sugar modification: 2'-O-methoxyethylribose
  modified_base 15: mod_base = OTHER; note = sugar modification: 2'-O-methoxyethylribose; note = backbone modification: 5'-phosphorothioate; note = thymine
  modified_base 16: mod_base = OTHER; note = sugar modification: 2'-O-methoxyethylribose; note = backbone modification: 5'-phosphorothioate
  modified_base 17: mod_base = OTHER; note = sugar modification: 2'-O-methoxyethylribose; note = backbone modification: 5'-phosphorothioate
  modified_base 18: mod_base = OTHER; note = sugar modification: 2'-O-methoxyethylribose
catcccactgattctgaa

SEQ ID NO: 345 - RNA, 18 nt, synthetic construct
  source 1..18: mol_type = other RNA; note = Antisense oligonucleotide
  modified_base 1: mod_base = OTHER; note = backbone modification: 5'-phosphorothioate; note = thymine; note = sugar modification: 2'-O-methoxyethylribose
  modified_base 2: mod_base = OTHER; note = sugar modification: 2'-O-methoxyethylribose; note = backbone modification: 5'-phosphorothioate
  modified_base 3: mod_base = m5c; mod_base = OTHER; note = backbone modification: 5'-phosphorothioate; note = sugar modification: 2'-O-methoxyethylribose
  modified_base 4: mod_base = OTHER; note = backbone modification: 5'-phosphorothioate; note = sugar modification: 2'-O-methoxyethylribose; note = thymine
  modified_base 5: mod_base = OTHER; note = sugar modification: 2'-O-methoxyethylribose; note = backbone modification: 5'-phosphorothioate; note = thymine
  modified_base 6: mod_base = m5c; mod_base = OTHER; note = sugar modification: 2'-O-methoxyethylribose; note = backbone modification: 5'-phosphorothioate
  modified_base 7: mod_base = OTHER; note = backbone modification: 5'-phosphorothioate; note = sugar modification: 2'-O-methoxyethylribose
  modified_base 8: mod_base = OTHER; note = thymine; note = backbone modification: 5'-phosphorothioate; note = sugar modification: 2'-O-methoxyethylribose
  modified_base 9: mod_base = OTHER; mod_base = m5c; note = backbone modification: 5'-phosphorothioate; note = sugar modification: 2'-O-methoxyethylribose
  modified_base 10: mod_base = OTHER; mod_base = m5c; note = backbone modification: 5'-phosphorothioate; note = sugar modification: 2'-O-methoxyethylribose
  modified_base 11: mod_base = OTHER; mod_base = m5c; note = backbone modification: 5'-phosphorothioate; note = sugar modification: 2'-O-methoxyethylribose
  modified_base 12: mod_base = OTHER; note = sugar modification: 2'-O-methoxyethylribose; note = backbone modification: 5'-phosphorothioate
  modified_base 13: mod_base = m5c; mod_base = OTHER; note = backbone modification: 5'-phosphorothioate; note = sugar modification: 2'-O-methoxyethylribose
  modified_base 14: mod_base = OTHER; note = thymine; note = sugar modification: 2'-O-methoxyethylribose; note = backbone modification: 5'-phosphorothioate
  modified_base 15: mod_base = OTHER; note = sugar modification: 2'-O-methoxyethylribose; note = backbone modification: 5'-phosphorothioate
  modified_base 16: mod_base = OTHER; note = backbone modification: 5'-phosphorothioate; note = sugar modification: 2'-O-methoxyethylribose
  modified_base 17: mod_base = OTHER; note = backbone modification: 5'-phosphorothioate; note = sugar modification: 2'-O-methoxyethylribose; note = thymine
  modified_base 18: mod_base = OTHER; note = thymine; note = sugar modification: 2'-O-methoxyethylribose
tacttcatcccactgatt

SEQ ID NO: 346 - RNA, 18 nt, synthetic construct
  source 1..18: mol_type = other RNA; note = Antisense oligonucleotide
  modified_base 1: mod_base = OTHER; note = backbone modification: 5'-phosphorothioate; note = sugar modification: 2'-O-methoxyethylribose; note = thymine
  modified_base 2: mod_base = m5c; mod_base = OTHER; note = sugar modification: 2'-O-methoxyethylribose; note = backbone modification: 5'-phosphorothioate
  modified_base 3: mod_base = OTHER; note = sugar modification: 2'-O-methoxyethylribose; note = backbone modification: 5'-phosphorothioate; note = thymine
  modified_base 4: mod_base = OTHER; note = thymine; note = backbone modification: 5'-phosphorothioate; note = sugar modification: 2'-O-methoxyethylribose
  modified_base 5: mod_base = OTHER; note = backbone modification: 5'-phosphorothioate; note = sugar modification: 2'-O-methoxyethylribose
  modified_base 6: mod_base = OTHER; note = backbone modification: 5'-phosphorothioate; note = sugar modification: 2'-O-methoxyethylribose; note = thymine
  modified_base 7: mod_base = OTHER; note = sugar modification: 2'-O-methoxyethylribose; note = backbone modification: 5'-phosphorothioate
  modified_base 8: mod_base = m5c; mod_base = OTHER; note = sugar modification: 2'-O-methoxyethylribose; note = backbone modification: 5'-phosphorothioate
  modified_base 9: mod_base = OTHER; note = thymine; note = sugar modification: 2'-O-methoxyethylribose; note = backbone modification: 5'-phosphorothioate
  modified_base 10: mod_base = OTHER; note = thymine; note = backbone modification: 5'-phosphorothioate; note = sugar modification: 2'-O-methoxyethylribose
  modified_base 11: mod_base = OTHER; mod_base = m5c; note = backbone modification: 5'-phosphorothioate; note = sugar modification: 2'-O-methoxyethylribose
  modified_base 12: mod_base = OTHER; note = backbone modification: 5'-phosphorothioate; note = sugar modification: 2'-O-methoxyethylribose
  modified_base 13: mod_base = OTHER; note = sugar modification: 2'-O-methoxyethylribose; note = thymine; note = backbone modification: 5'-phosphorothioate
  modified_base 14: mod_base = OTHER; mod_base = m5c; note = sugar modification: 2'-O-methoxyethylribose; note = backbone modification: 5'-phosphorothioate
  modified_base 15: mod_base = OTHER; mod_base = m5c; note = backbone modification: 5'-phosphorothioate; note = sugar modification: 2'-O-methoxyethylribose
  modified_base 16: mod_base = OTHER; mod_base = m5c; note = backbone modification: 5'-phosphorothioate; note = sugar modification: 2'-O-methoxyethylribose
  modified_base 17: mod_base = OTHER; note = sugar modification: 2'-O-methoxyethylribose; note = backbone modification: 5'-phosphorothioate
  modified_base 18: mod_base = OTHER; mod_base = m5c; note = sugar modification: 2'-O-methoxyethylribose
tcttgtacttcatcccac

SEQ ID NO: 347 - RNA, 18 nt, synthetic construct
  source 1..18: mol_type = other RNA; note = Antisense oligonucleotide
  modified_base 1: mod_base = OTHER; note = sugar modification: 2'-O-methoxyethylribose; note = backbone modification: 5'-phosphorothioate
  modified_base 2: mod_base = OTHER; note = sugar modification: 2'-O-methoxyethylribose; note = backbone modification: 5'-phosphorothioate
  modified_base 3: mod_base = OTHER; note = backbone modification: 5'-phosphorothioate; note = thymine; note = sugar modification: 2'-O-methoxyethylribose
  modified_base 4: mod_base = OTHER; note = backbone modification: 5'-phosphorothioate; note = sugar modification: 2'-O-methoxyethylribose
  modified_base 5: mod_base = OTHER; note = thymine; note = backbone modification: 5'-phosphorothioate; note = sugar modification: 2'-O-methoxyethylribose
  modified_base 6: mod_base = OTHER; note = backbone modification: 5'-phosphorothioate; note = thymine; note = sugar modification: 2'-O-methoxyethylribose
  modified_base 7: mod_base = OTHER; mod_base = m5c; note = backbone modification: 5'-phosphorothioate; note = sugar modification: 2'-O-methoxyethylribose
  modified_base 8: mod_base = OTHER; note = thymine; note = sugar modification: 2'-O-methoxyethylribose; note = backbone modification: 5'-phosphorothioate
  modified_base 9: mod_base = OTHER; note = thymine; note = sugar modification: 2'-O-methoxyethylribose; note = backbone modification: 5'-phosphorothioate
  modified_base 10: mod_base = OTHER; note = sugar modification: 2'-O-methoxyethylribose; note = backbone modification: 5'-phosphorothioate
  modified_base 11: mod_base = OTHER; note = thymine; note = backbone modification: 5'-phosphorothioate; note = sugar modification: 2'-O-methoxyethylribose
  modified_base 12: mod_base = OTHER; note = sugar modification: 2'-O-methoxyethylribose; note = backbone modification: 5'-phosphorothioate
  modified_base 13: mod_base = m5c; mod_base = OTHER; note = sugar modification: 2'-O-methoxyethylribose; note = backbone modification: 5'-phosphorothioate
  modified_base 14: mod_base = OTHER; note = backbone modification: 5'-phosphorothioate; note = thymine; note = sugar modification: 2'-O-methoxyethylribose
  modified_base 15: mod_base = OTHER; note = backbone modification: 5'-phosphorothioate; note = sugar modification: 2'-O-methoxyethylribose; note = thymine
  modified_base 16: mod_base = OTHER; mod_base = m5c; note = backbone modification: 5'-phosphorothioate; note = sugar modification: 2'-O-methoxyethylribose
  modified_base 17: mod_base = OTHER; note = backbone modification: 5'-phosphorothioate; note = sugar modification: 2'-O-methoxyethylribose
  modified_base 18: mod_base = OTHER; note = sugar modification: 2'-O-methoxyethylribose; note = thymine
ggtgttcttgtacttcat

SEQ ID NO: 348 - RNA, 18 nt, synthetic construct
  source 1..18: mol_type = other RNA; note = Antisense oligonucleotide
  modified_base 1: mod_base = OTHER; mod_base = m5c; note = sugar modification: 2'-O-methoxyethylribose; note = backbone modification: 5'-phosphorothioate
  modified_base 2: mod_base = OTHER; note = thymine; note = sugar modification: 2'-O-methoxyethylribose; note = backbone modification: 5'-phosphorothioate
  modified_base 3: mod_base = OTHER; note = sugar modification: 2'-O-methoxyethylribose; note = backbone modification: 5'-phosphorothioate
  modified_base 4: mod_base = OTHER; note = backbone modification: 5'-phosphorothioate; note = sugar modification: 2'-O-methoxyethylribose
  modified_base 5: mod_base = OTHER; note = sugar modification: 2'-O-methoxyethylribose; note = backbone modification: 5'-phosphorothioate
  modified_base 6: mod_base = OTHER; note = backbone modification: 5'-phosphorothioate; note = sugar modification: 2'-O-methoxyethylribose
  modified_base 7: mod_base = OTHER; note = sugar modification: 2'-O-methoxyethylribose; note = backbone modification: 5'-phosphorothioate
  modified_base 8: mod_base = OTHER; note = sugar modification: 2'-O-methoxyethylribose; note = backbone modification: 5'-phosphorothioate; note = thymine
  modified_base 9: mod_base = OTHER; note = sugar modification: 2'-O-methoxyethylribose; note = backbone modification: 5'-phosphorothioate
  modified_base 10: mod_base = OTHER; note = sugar modification: 2'-O-methoxyethylribose; note = backbone modification: 5'-phosphorothioate; note = thymine
  modified_base 11: mod_base = OTHER; note = sugar modification: 2'-O-methoxyethylribose; note = thymine; note = backbone modification: 5'-phosphorothioate
  modified_base 12: mod_base = OTHER; mod_base = m5c; note = sugar modification: 2'-O-methoxyethylribose; note = backbone modification: 5'-phosphorothioate
  modified_base 13: mod_base = OTHER; note = sugar modification: 2'-O-methoxyethylribose; note = thymine; note = backbone modification: 5'-phosphorothioate
  modified_base 14: mod_base = OTHER; note = backbone modification: 5'-phosphorothioate; note = thymine; note = sugar modification: 2'-O-methoxyethylribose
  modified_base 15: mod_base = OTHER; note = sugar modification: 2'-O-methoxyethylribose; note = backbone modification: 5'-phosphorothioate
  modified_base 16: mod_base = OTHER; note = backbone modification: 5'-phosphorothioate; note = thymine; note = sugar modification: 2'-O-methoxyethylribose
  modified_base 17: mod_base = OTHER; note = sugar modification: 2'-O-methoxyethylribose; note = backbone modification: 5'-phosphorothioate
  modified_base 18: mod_base = OTHER; mod_base = m5c; note = sugar modification: 2'-O-methoxyethylribose
ctgaaggtgttcttgtac

SEQ ID NO: 349 - RNA, 18 nt, synthetic construct
  source 1..18: mol_type = other RNA; note = Antisense oligonucleotide
  modified_base 1: mod_base = OTHER; mod_base = m5c; note = sugar modification: 2'-O-methoxyethylribose; note = backbone modification: 5'-phosphorothioate
  modified_base 2: mod_base = OTHER; note = sugar modification: 2'-O-methoxyethylribose; note = backbone modification: 5'-phosphorothioate
  modified_base 3: mod_base = OTHER; note = sugar modification: 2'-O-methoxyethylribose; note = backbone modification: 5'-phosphorothioate
  modified_base 4: mod_base = OTHER; note = backbone modification: 5'-phosphorothioate; note = thymine; note = sugar modification: 2'-O-methoxyethylribose
  modified_base 5: mod_base = OTHER; note = thymine; note = sugar modification: 2'-O-methoxyethylribose; note = backbone modification: 5'-phosphorothioate
  modified_base 6: mod_base = OTHER; mod_base = m5c; note = backbone modification: 5'-phosphorothioate; note = sugar modification: 2'-O-methoxyethylribose
  modified_base 7: mod_base = OTHER; note = backbone modification: 5'-phosphorothioate; note = sugar modification: 2'-O-methoxyethylribose; note = thymine
  modified_base 8: mod_base = OTHER; note = sugar modification: 2'-O-methoxyethylribose; note = backbone modification: 5'-phosphorothioate
  modified_base 9: mod_base = OTHER; note = sugar modification: 2'-O-methoxyethylribose; note = backbone modification: 5'-phosphorothioate
  modified_base 10: mod_base = OTHER; note = backbone modification: 5'-phosphorothioate; note = sugar modification: 2'-O-methoxyethylribose
  modified_base 11: mod_base = OTHER; note = backbone modification: 5'-phosphorothioate; note = sugar modification: 2'-O-methoxyethylribose
  modified_base 12: mod_base = OTHER; note = backbone modification: 5'-phosphorothioate; note = sugar modification: 2'-O-methoxyethylribose
  modified_base 13: mod_base = OTHER; note = backbone modification: 5'-phosphorothioate; note = thymine; note = sugar modification: 2'-O-methoxyethylribose
  modified_base 14: mod_base = OTHER; note = backbone modification: 5'-phosphorothioate; note = sugar modification: 2'-O-methoxyethylribose
  modified_base 15: mod_base = OTHER; note = backbone modification: 5'-phosphorothioate; note = thymine; note = sugar modification: 2'-O-methoxyethylribose
  modified_base 16: mod_base = OTHER; note = sugar modification: 2'-O-methoxyethylribose; note = backbone modification: 5'-phosphorothioate; note = thymine
  modified_base 17: mod_base = OTHER; mod_base = m5c; note = sugar modification: 2'-O-methoxyethylribose; note = backbone modification: 5'-phosphorothioate
  modified_base 18: mod_base = OTHER; note = sugar modification: 2'-O-methoxyethylribose; note = thymine
cggttctgaaggtgttct

SEQ ID NO: 350 - RNA, 18 nt, synthetic construct
  source 1..18: mol_type = other RNA; note = Antisense oligonucleotide
  modified_base 1: mod_base = OTHER; note = backbone modification: 5'-phosphorothioate; note = sugar modification: 2'-O-methoxyethylribose
  modified_base 2: mod_base = m5c; mod_base = OTHER; note = backbone modification: 5'-phosphorothioate; note = sugar modification: 2'-O-methoxyethylribose
  modified_base 3: mod_base = OTHER; mod_base = m5c; note = sugar modification: 2'-O-methoxyethylribose; note = backbone modification: 5'-phosphorothioate
  modified_base 4: mod_base = OTHER; note = sugar modification: 2'-O-methoxyethylribose; note = thymine; note = backbone modification: 5'-phosphorothioate
  modified_base 5: mod_base = m5c; mod_base = OTHER; note = sugar modification: 2'-O-methoxyethylribose; note = backbone modification: 5'-phosphorothioate
  modified_base 6: mod_base = m5c; mod_base = OTHER; note = backbone modification: 5'-phosphorothioate; note = sugar modification: 2'-O-methoxyethylribose
  modified_base 7: mod_base = OTHER; note = sugar modification: 2'-O-methoxyethylribose; note = backbone modification: 5'-phosphorothioate
  modified_base 8: mod_base = OTHER; note = sugar modification: 2'-O-methoxyethylribose; note = backbone modification: 5'-phosphorothioate
  modified_base 9: mod_base = OTHER; note = backbone modification: 5'-phosphorothioate; note = thymine; note = sugar modification: 2'-O-methoxyethylribose
  modified_base 10: mod_base = OTHER; note = thymine; note = sugar modification: 2'-O-methoxyethylribose; note = backbone modification: 5'-phosphorothioate
  modified_base 11: mod_base = OTHER; mod_base = m5c; note = backbone modification: 5'-phosphorothioate; note = sugar modification: 2'-O-methoxyethylribose
  modified_base 12: mod_base = OTHER; note = thymine; note = backbone modification: 5'-phosphorothioate; note = sugar modification: 2'-O-methoxyethylribose
  modified_base 13: mod_base = OTHER; note = sugar modification: 2'-O-methoxyethylribose; note = backbone modification: 5'-phosphorothioate
  modified_base 14: mod_base = OTHER; note = backbone modification: 5'-phosphorothioate; note = sugar modification: 2'-O-methoxyethylribose
  modified_base 15: mod_base = OTHER; note = sugar modification: 2'-O-methoxyethylribose; note = backbone modification: 5'-phosphorothioate
  modified_base 16: mod_base = OTHER; note = backbone modification: 5'-phosphorothioate; note = sugar modification: 2'-O-methoxyethylribose
  modified_base 17: mod_base = OTHER; note = backbone modification: 5'-phosphorothioate; note = sugar modification: 2'-O-methoxyethylribose
  modified_base 18: mod_base = OTHER; note = thymine; note = sugar modification: 2'-O-methoxyethylribose
gcctccggttctgaaggt

SEQ ID NO: 351 - RNA, 18 nt, synthetic construct
  source 1..18: mol_type = other RNA; note = Antisense oligonucleotide
  modified_base 1: mod_base = m5c; mod_base = OTHER; note = sugar modification: 2'-O-methoxyethylribose; note = backbone modification: 5'-phosphorothioate
  modified_base 2: mod_base = OTHER; note = sugar modification: 2'-O-methoxyethylribose; note = thymine; note = backbone modification: 5'-phosphorothioate
  modified_base 3: mod_base = OTHER; note = backbone modification: 5'-phosphorothioate; note = sugar modification: 2'-O-methoxyethylribose
  modified_base 4: mod_base = OTHER; note = sugar modification: 2'-O-methoxyethylribose; note = thymine; note = backbone modification: 5'-phosphorothioate
  modified_base 5: mod_base = OTHER; note = backbone modification: 5'-phosphorothioate; note = thymine; note = sugar modification: 2'-O-methoxyethylribose
  modified_base 6: mod_base = OTHER; note = sugar modification: 2'-O-methoxyethylribose; note = backbone modification: 5'-phosphorothioate
  modified_base 7: mod_base = m5c; mod_base = OTHER; note = backbone modification: 5'-phosphorothioate; note = sugar modification: 2'-O-methoxyethylribose
  modified_base 8: mod_base = OTHER; mod_base = m5c; note = sugar modification: 2'-O-methoxyethylribose; note = backbone modification: 5'-phosphorothioate
  modified_base 9: mod_base = OTHER; note = thymine; note = backbone modification: 5'-phosphorothioate; note = sugar modification: 2'-O-methoxyethylribose
  modified_base 10: mod_base = OTHER; mod_base = m5c; note = backbone modification: 5'-phosphorothioate; note = sugar modification: 2'-O-methoxyethylribose
  modified_base 11: mod_base = m5c; mod_base = OTHER; note = backbone modification: 5'-phosphorothioate; note = sugar modification: 2'-O-methoxyethylribose
  modified_base 12: mod_base = OTHER; note = backbone modification: 5'-phosphorothioate; note = sugar modification: 2'-O-methoxyethylribose
  modified_base 13: mod_base = OTHER; note = sugar modification: 2'-O-methoxyethylribose; note = backbone modification: 5'-phosphorothioate
  modified_base 14: mod_base = OTHER; note = thymine; note = sugar modification: 2'-O-methoxyethylribose; note = backbone modification: 5'-phosphorothioate
  modified_base 15: mod_base = OTHER; note = sugar modification: 2'-O-methoxyethylribose; note = backbone modification: 5'-phosphorothioate; note = thymine
  modified_base 16: mod_base = OTHER; mod_base = m5c; note = sugar modification: 2'-O-methoxyethylribose; note = backbone modification: 5'-phosphorothioate
  modified_base 17: mod_base = OTHER; note = backbone modification: 5'-phosphorothioate; note = sugar modification: 2'-O-methoxyethylribose; note = thymine
  modified_base 18: mod_base = OTHER; note = sugar modification: 2'-O-methoxyethylribose
ctgttgcctccggttctg

SEQ ID NO: 352 - RNA, 18 nt, synthetic construct
  source 1..18: mol_type = other RNA; note = Antisense oligonucleotide
  modified_base 1: mod_base = OTHER; note = thymine; note = backbone modification: 5'-phosphorothioate; note = sugar modification: 2'-O-methoxyethylribose
  modified_base 2: mod_base = OTHER; note = backbone modification: 5'-phosphorothioate; note = sugar modification: 2'-O-methoxyethylribose; note = thymine
  modified_base 3: mod_base = OTHER; mod_base = m5c; note = backbone modification: 5'-phosphorothioate; note = sugar modification: 2'-O-methoxyethylribose
  modified_base 4: mod_base = OTHER; note = sugar modification: 2'-O-methoxyethylribose; note = backbone modification: 5'-phosphorothioate
  modified_base 5: mod_base = OTHER; note = backbone modification: 5'-phosphorothioate; note = sugar modification: 2'-O-methoxyethylribose
  modified_base 6: mod_base = m5c; mod_base = OTHER; note = sugar modification: 2'-O-methoxyethylribose; note = backbone modification: 5'-phosphorothioate
  modified_base 7: mod_base = OTHER; note = backbone modification: 5'-phosphorothioate; note = thymine; note = sugar modification: 2'-O-methoxyethylribose
  modified_base 8: mod_base = OTHER; note = sugar modification: 2'-O-methoxyethylribose; note = backbone modification: 5'-phosphorothioate
  modified_base 9: mod_base = OTHER; note = backbone modification: 5'-phosphorothioate; note = sugar modification: 2'-O-methoxyethylribose; note = thymine
  modified_base 10: mod_base = OTHER; note = thymine; note = backbone modification: 5'-phosphorothioate; note = sugar modification: 2'-O-methoxyethylribose
  modified_base 11: mod_base = OTHER; note = sugar modification: 2'-O-methoxyethylribose; note = backbone modification: 5'-phosphorothioate
  modified_base 12: mod_base = m5c; mod_base = OTHER; note = backbone modification: 5'-phosphorothioate; note = sugar modification: 2'-O-methoxyethylribose
  modified_base 13: mod_base = m5c; mod_base = OTHER; note = sugar modification: 2'-O-methoxyethylribose; note = backbone modification: 5'-phosphorothioate
  modified_base 14: mod_base = OTHER; note = sugar modification: 2'-O-methoxyethylribose; note = backbone modification: 5'-phosphorothioate; note = thymine
  modified_base 15: mod_base = OTHER; mod_base = m5c; note = sugar modification: 2'-O-methoxyethylribose; note = backbone modification: 5'-phosphorothioate
  modified_base 16: mod_base = OTHER; mod_base = m5c; note = backbone modification: 5'-phosphorothioate; note = sugar modification: 2'-O-methoxyethylribose
  modified_base 17: mod_base = OTHER; note = sugar modification: 2'-O-methoxyethylribose; note = backbone modification: 5'-phosphorothioate
  modified_base 18: mod_base = OTHER; note = sugar modification: 2'-O-methoxyethylribose
ttcaactgttgcctccgg

SEQ ID NO: 353 - RNA, 18 nt, synthetic construct
  source 1..18: mol_type = other RNA; note = Antisense oligonucleotide
  modified_base 1: mod_base = OTHER; note = thymine; note = sugar modification: 2'-O-methoxyethylribose; note = backbone modification: 5'-phosphorothioate
  modified_base 2: mod_base = OTHER; note = backbone modification: 5'-phosphorothioate; note = thymine; note = sugar modification: 2'-O-methoxyethylribose
  modified_base 3: mod_base = OTHER; note = thymine; note = sugar modification: 2'-O-methoxyethylribose; note = backbone modification: 5'-phosphorothioate
  modified_base 4: mod_base = OTHER; mod_base = m5c; note = backbone modification: 5'-phosphorothioate; note = sugar modification: 2'-O-methoxyethylribose
  modified_base 5: mod_base = OTHER; note = sugar modification: 2'-O-methoxyethylribose; note = backbone modification: 5'-phosphorothioate
  modified_base 6: mod_base = OTHER; note = backbone modification: 5'-phosphorothioate; note = thymine; note = sugar modification: 2'-O-methoxyethylribose
  modified_base 7: mod_base = OTHER; note = thymine; note = sugar modification: 2'-O-methoxyethylribose; note = backbone modification: 5'-phosphorothioate
  modified_base 8: mod_base = OTHER; mod_base = m5c; note = backbone modification: 5'-phosphorothioate; note = sugar modification: 2'-O-methoxyethylribose
  modified_base 9: mod_base = OTHER; note = backbone modification: 5'-phosphorothioate; note = sugar modification: 2'-O-methoxyethylribose
  modified_base 10: mod_base = OTHER; note = sugar modification: 2'-O-methoxyethylribose; note = backbone modification: 5'-phosphorothioate
  modified_base 11: mod_base = OTHER; mod_base = m5c; note = backbone modification: 5'-phosphorothioate; note = sugar modification: 2'-O-methoxyethylribose
  modified_base 12: mod_base = OTHER; note = backbone modification: 5'-phosphorothioate; note = thymine; note = sugar modification: 2'-O-methoxyethylribose
  modified_base 13: mod_base = OTHER; note = backbone modification: 5'-phosphorothioate; note = sugar modification: 2'-O-methoxyethylribose
  modified_base 14: mod_base = OTHER; note = sugar modification: 2'-O-methoxyethylribose; note = thymine; note = backbone modification: 5'-phosphorothioate
  modified_base 15: mod_base = OTHER; note = backbone modification: 5'-phosphorothioate; note = thymine; note = sugar modification: 2'-O-methoxyethylribose
  modified_base 16: mod_base = OTHER; note = sugar modification: 2'-O-methoxyethylribose; note = backbone modification: 5'-phosphorothioate
  modified_base 17: mod_base = OTHER; mod_base = m5c; note = backbone modification: 5'-phosphorothioate; note = sugar modification: 2'-O-methoxyethylribose
  modified_base 18: mod_base = m5c; mod_base = OTHER; note = sugar modification: 2'-O-methoxyethylribose
tttcattcaactgttgcc

SEQ ID NO: 354 - RNA, 18 nt, synthetic construct
  source 1..18: mol_type = other RNA; note = Antisense oligonucleotide
  modified_base 1: mod_base = OTHER; note = thymine; note = sugar modification: 2'-O-methoxyethylribose; note = backbone modification: 5'-phosphorothioate
  modified_base 2: mod_base = OTHER; note = sugar modification: 2'-O-methoxyethylribose; note = backbone modification: 5'-phosphorothioate
  modified_base 3: mod_base = OTHER; note = backbone modification: 5'-phosphorothioate; note = sugar modification: 2'-O-methoxyethylribose
  modified_base 4: mod_base = OTHER; mod_base = m5c; note = sugar modification: 2'-O-methoxyethylribose; note = backbone modification: 5'-phosphorothioate
  modified_base 5: mod_base = OTHER; note = backbone modification: 5'-phosphorothioate; note = sugar modification: 2'-O-methoxyethylribose
  modified_base 6: mod_base = OTHER; note = thymine; note = sugar modification: 2'-O-methoxyethylribose; note = backbone modification: 5'-phosphorothioate
  modified_base 7: mod_base = OTHER; note = sugar modification: 2'-O-methoxyethylribose; note = thymine; note = backbone modification: 5'-phosphorothioate
  modified_base 8: mod_base = OTHER; note = backbone modification: 5'-phosphorothioate; note = thymine; note = sugar modification: 2'-O-methoxyethylribose
  modified_base 9: mod_base = m5c; mod_base = OTHER; note = backbone modification: 5'-phosphorothioate; note = sugar modification: 2'-O-methoxyethylribose
  modified_base 10: mod_base = OTHER; note = sugar modification: 2'-O-methoxyethylribose; note = backbone modification: 5'-phosphorothioate
  modified_base 11: mod_base = OTHER; note = sugar modification: 2'-O-methoxyethylribose; note = backbone modification: 5'-phosphorothioate; note = thymine
  modified_base 12: mod_base = OTHER; note = thymine; note = sugar modification: 2'-O-methoxyethylribose; note = backbone modification: 5'-phosphorothioate
  modified_base 13: mod_base = m5c; mod_base = OTHER; note = sugar modification: 2'-O-methoxyethylribose; note = backbone modification: 5'-phosphorothioate
  modified_base 14: mod_base = OTHER; note = backbone modification: 5'-phosphorothioate; note = sugar modification: 2'-O-methoxyethylribose
  modified_base 15: mod_base = OTHER; note = sugar modification: 2'-O-methoxyethylribose; note = backbone modification: 5'-phosphorothioate
  modified_base 16: mod_base = OTHER; mod_base = m5c; note = sugar modification: 2'-O-methoxyethylribose; note = backbone modification: 5'-phosphorothioate
  modified_base 17: mod_base = OTHER; note = sugar modification: 2'-O-methoxyethylribose; note = backbone modification: 5'-phosphorothioate; note = thymine
  modified_base 18: mod_base = OTHER; note = sugar modification: 2'-O-methoxyethylribose
taacatttcattcaactg

SEQ ID NO: 355 - RNA, 18 nt, synthetic construct
  source 1..18: mol_type = other RNA; note = Antisense oligonucleotide
  modified_base 1: mod_base = OTHER; note = thymine; note = sugar modification: 2'-O-methoxyethylribose; note = backbone modification: 5'-phosphorothioate
  modified_base 2: mod_base = OTHER; mod_base = m5c; note = backbone modification: 5'-phosphorothioate; note = sugar modification: 2'-O-methoxyethylribose
  modified_base 3: mod_base = OTHER; mod_base = m5c; note = sugar modification: 2'-O-methoxyethylribose; note = backbone modification: 5'-phosphorothioate
  modified_base 4: mod_base = OTHER; note = sugar modification: 2'-O-methoxyethylribose; note = backbone modification: 5'-phosphorothioate; note = thymine
  modified_base 5: mod_base = OTHER; note = backbone modification: 5'-phosphorothioate; note = thymine; note = sugar modification: 2'-O-methoxyethylribose
  modified_base 6: mod_base = OTHER; note = thymine; note = sugar modification: 2'-O-methoxyethylribose; note = backbone modification: 5'-phosphorothioate
  modified_base 7: mod_base = OTHER; note = sugar modification: 2'-O-methoxyethylribose; note = backbone modification: 5'-phosphorothioate
  modified_base 8: mod_base = OTHER; note = sugar modification: 2'-O-methoxyethylribose; note = backbone modification: 5'-phosphorothioate
  modified_base 9: mod_base = OTHER; mod_base = m5c; note = sugar modification: 2'-O-methoxyethylribose; note = backbone modification: 5'-phosphorothioate
  modified_base 10: mod_base = OTHER; note = backbone modification: 5'-phosphorothioate; note = sugar modification: 2'-O-methoxyethylribose
  modified_base 11: mod_base = OTHER; note = sugar modification: 2'-O-methoxyethylribose; note = thymine; note = backbone modification: 5'-phosphorothioate
  modified_base 12: mod_base = OTHER; note = thymine; note = sugar modification: 2'-O-methoxyethylribose; note = backbone modification: 5'-phosphorothioate
  modified_base 13: mod_base = OTHER; note = thymine; note = sugar modification: 2'-O-methoxyethylribose; note = backbone modification: 5'-phosphorothioate
  modified_base 14: mod_base = m5c; mod_base = OTHER; note = backbone modification: 5'-phosphorothioate; note = sugar modification: 2'-O-methoxyethylribose
  modified_base 15: mod_base = OTHER; note = backbone modification: 5'-phosphorothioate; note = sugar modification: 2'-O-methoxyethylribose
  modified_base 16: mod_base = OTHER; note = backbone modification: 5'-phosphorothioate; note = sugar modification: 2'-O-methoxyethylribose; note = thymine
  modified_base 17: mod_base = OTHER; note = sugar modification: 2'-O-methoxyethylribose; note = backbone modification: 5'-phosphorothioate; note = thymine
  modified_base 18: mod_base = m5c; mod_base = OTHER; note = sugar modification: 2'-O-methoxyethylribose
tcctttaacatttcattc

SEQ ID NO: 356 - RNA, 18 nt, synthetic construct
  source 1..18: mol_type = other RNA; note = Antisense oligonucleotide
  modified_base 1: mod_base = OTHER; note = thymine; note = sugar modification: 2'-O-methoxyethylribose; note = backbone modification: 5'-phosphorothioate
  modified_base 2: mod_base = OTHER; note = sugar modification: 2'-O-methoxyethylribose; note = thymine; note = backbone modification: 5'-phosphorothioate
  modified_base 3: mod_base = OTHER; note = backbone modification: 5'-phosphorothioate; note = sugar modification: 2'-O-methoxyethylribose
  modified_base 4: mod_base = OTHER; note = sugar modification: 2'-O-methoxyethylribose; note = backbone modification: 5'-phosphorothioate
  modified_base 5: mod_base = OTHER; note = backbone modification: 5'-phosphorothioate; note = sugar modification: 2'-O-methoxyethylribose
  modified_base 6: mod_base = OTHER; note = sugar modification: 2'-O-methoxyethylribose; note = thymine; note = backbone modification: 5'-phosphorothioate
  modified_base 7: mod_base = OTHER; mod_base = m5c; note = sugar modification: 2'-O-methoxyethylribose; note = backbone modification: 5'-phosphorothioate
  modified_base 8: mod_base = OTHER; mod_base = m5c; note = backbone modification: 5'-phosphorothioate; note = sugar modification: 2'-O-methoxyethylribose
  modified_base 9: mod_base = OTHER; note = backbone modification: 5'-phosphorothioate; note = sugar modification: 2'-O-methoxyethylribose; note = thymine
  modified_base 10: mod_base = OTHER; note = sugar modification: 2'-O-methoxyethylribose; note = thymine; note = backbone modification: 5'-phosphorothioate
  modified_base 11: mod_base = OTHER; note = backbone modification: 5'-phosphorothioate; note = sugar modification: 2'-O-methoxyethylribose; note = thymine
  modified_base 12: mod_base = OTHER; note = backbone modification: 5'-phosphorothioate; note = sugar modification: 2'-O-methoxyethylribose
  modified_base 13: mod_base = OTHER; note = sugar modification: 2'-O-methoxyethylribose; note = backbone modification: 5'-phosphorothioate
  modified_base 14: mod_base = m5c; mod_base = OTHER; note = backbone modification: 5'-phosphorothioate; note = sugar modification: 2'-O-methoxyethylribose
  modified_base 15: mod_base = OTHER; note = sugar modification: 2'-O-methoxyethylribose; note = backbone modification: 5'-phosphorothioate
  modified_base 16: mod_base = OTHER; note = backbone modification: 5'-phosphorothioate; note = sugar modification: 2'-O-methoxyethylribose; note = thymine
  modified_base 17: mod_base = OTHER; note = sugar modification: 2'-O-methoxyethylribose; note = thymine; note = backbone modification: 5'-phosphorothioate
  modified_base 18: mod_base = OTHER; note = thymine; note = sugar modification: 2'-O-methoxyethylribose
ttgaatcctttaacattt

SEQ ID NO: 357 - RNA, 18 nt, synthetic construct
  source 1..18: mol_type = other RNA; note = Antisense oligonucleotide
  modified_base 1: mod_base = OTHER; note = backbone modification: 5'-phosphorothioate; note = thymine; note = sugar modification: 2'-O-methoxyethylribose
  modified_base 2: mod_base = OTHER; note = sugar modification: 2'-O-methoxyethylribose; note = backbone modification: 5'-phosphorothioate; note = thymine
  modified_base 3: mod_base = OTHER; note = sugar modification: 2'-O-methoxyethylribose; note = backbone modification: 5'-phosphorothioate
  modified_base 4: mod_base = OTHER; note = backbone modification: 5'-phosphorothioate; note = sugar modification: 2'-O-methoxyethylribose; note = thymine
  modified_base 5: mod_base = OTHER; note = sugar modification: 2'-O-methoxyethylribose; note = backbone modification: 5'-phosphorothioate
  modified_base 6: mod_base = OTHER; note = backbone modification: 5'-phosphorothioate; note = thymine; note = sugar modification: 2'-O-methoxyethylribose
  modified_base 7: mod_base = OTHER; note = thymine; note = sugar modification: 2'-O-methoxyethylribose; note = backbone modification: 5'-phosphorothioate
  modified_base 8: mod_base = OTHER; note = sugar modification: 2'-O-methoxyethylribose; note = backbone modification: 5'-phosphorothioate
  modified_base 9: mod_base = OTHER; note = backbone modification: 5'-phosphorothioate; note = sugar modification: 2'-O-methoxyethylribose
  modified_base 10: mod_base = OTHER; note = sugar modification: 2'-O-methoxyethylribose; note = backbone modification: 5'-phosphorothioate
  modified_base 11: mod_base = OTHER; note = sugar modification: 2'-O-methoxyethylribose; note = thymine; note = backbone modification: 5'-phosphorothioate
  modified_base 12: mod_base = m5c; mod_base = OTHER; note = sugar modification: 2'-O-methoxyethylribose; note = backbone modification: 5'-phosphorothioate
  modified_base 13: mod_base = OTHER; mod_base = m5c; note = backbone modification: 5'-phosphorothioate; note = sugar modification: 2'-O-methoxyethylribose
  modified_base 14: mod_base = OTHER; note = sugar modification: 2'-O-methoxyethylribose; note = thymine; note = backbone modification: 5'-phosphorothioate
  modified_base 15: mod_base = OTHER; note = sugar modification: 2'-O-methoxyethylribose; note = thymine; note = backbone modification: 5'-phosphorothioate
  modified_base 16: mod_base = OTHER; note = backbone modification: 5'-phosphorothioate; note = thymine; note = sugar modification: 2'-O-methoxyethylribose
  modified_base 17: mod_base = OTHER; note = sugar modification: 2'-O-methoxyethylribose; note = backbone modification: 5'-phosphorothioate
  modified_base 18: mod_base = OTHER; note = sugar modification: 2'-O-methoxyethylribose
ttgtgttgaatcctttaa

SEQ ID NO: 358 - RNA, 18 nt, synthetic construct
  source 1..18: mol_type = other RNA; note = Antisense oligonucleotide
  modified_base 1: mod_base = OTHER; note = sugar modification: 2'-O-methoxyethylribose; note = backbone modification: 5'-phosphorothioate
  modified_base 2: mod_base = OTHER; note = sugar modification: 2'-O-methoxyethylribose; note = backbone modification: 5'-phosphorothioate
  modified_base 3: mod_base = OTHER; mod_base = m5c; note = sugar modification: 2'-O-methoxyethylribose; note = backbone modification: 5'-phosphorothioate
  modified_base 4: mod_base = m5c; mod_base = OTHER; note = sugar modification: 2'-O-methoxyethylribose; note = backbone modification: 5'-phosphorothioate
  modified_base 5: mod_base = OTHER; note = backbone modification: 5'-phosphorothioate; note = sugar modification: 2'-O-methoxyethylribose
  modified_base 6: mod_base = OTHER; note = thymine; note = backbone modification: 5'-phosphorothioate; note = sugar modification: 2'-O-methoxyethylribose
  modified_base 7: mod_base = OTHER; note = thymine; note = sugar modification: 2'-O-methoxyethylribose; note = backbone modification: 5'-phosphorothioate
  modified_base 8: mod_base = OTHER; note = sugar modification: 2'-O-methoxyethylribose; note = backbone modification: 5'-phosphorothioate
  modified_base 9: mod_base = OTHER; note = sugar modification: 2'-O-methoxyethylribose; note = backbone modification: 5'-phosphorothioate; note = thymine
  modified_base 10: mod_base = OTHER; note = sugar modification: 2'-O-methoxyethylribose; note = backbone modification: 5'-phosphorothioate
  modified_base 11: mod_base = OTHER; note = thymine; note = sugar modification: 2'-O-methoxyethylribose; note = backbone modification: 5'-phosphorothioate
  modified_base 12: mod_base = OTHER; note = thymine; note = backbone modification: 5'-phosphorothioate; note = sugar modification: 2'-O-methoxyethylribose
  modified_base 13: mod_base = OTHER; note = sugar modification: 2'-O-methoxyethylribose; note = backbone modification: 5'-phosphorothioate
  modified_base 14: mod_base = OTHER; note = backbone modification: 5'-phosphorothioate; note = sugar modification: 2'-O-methoxyethylribose
  modified_base 15: mod_base = OTHER; note = sugar modification: 2'-O-methoxyethylribose; note = backbone modification: 5'-phosphorothioate
  modified_base 16: mod_base = OTHER; note = thymine; note = backbone modification: 5'-phosphorothioate; note = sugar modification: 2'-O-methoxyethylribose
  modified_base 17: mod_base = OTHER; mod_base = m5c; note = sugar modification: 2'-O-methoxyethylribose; note = backbone modification: 5'-phosphorothioate
  modified_base 18: mod_base = m5c; mod_base = OTHER; note = sugar modification: 2'-O-methoxyethylribose
agccattgtgttgaatcc

SEQ ID NO: 359 - RNA, 18 nt, synthetic construct
  source 1..18: mol_type = other RNA; note = Antisense oligonucleotide
  modified_base 1: mod_base = m5c; mod_base = OTHER; note = sugar modification: 2'-O-methoxyethylribose; note = backbone modification: 5'-phosphorothioate
  modified_base 2: mod_base = OTHER; note = backbone modification: 5'-phosphorothioate; note = sugar modification: 2'-O-methoxyethylribose; note = thymine
  modified_base 3: mod_base = OTHER; note = backbone modification: 5'-phosphorothioate; note = sugar modification: 2'-O-methoxyethylribose; note = thymine
  modified_base 4: mod_base = m5c; mod_base = OTHER; note = backbone modification: 5'-phosphorothioate; note = sugar modification: 2'-O-methoxyethylribose
  modified_base 5: mod_base = OTHER; mod_base = m5c; note = sugar modification: 2'-O-methoxyethylribose; note = backbone modification: 5'-phosphorothioate
  modified_base 6: mod_base = OTHER; note = backbone modification: 5'-phosphorothioate; note = sugar modification: 2'-O-methoxyethylribose
  modified_base 7: mod_base = OTHER; note = sugar modification: 2'-O-methoxyethylribose; note = backbone modification: 5'-phosphorothioate
  modified_base 8: mod_base = m5c; mod_base = OTHER; note = sugar modification: 2'-O-methoxyethylribose; note = backbone modification: 5'-phosphorothioate
  modified_base 9: mod_base = OTHER; mod_base = m5c; note = backbone modification: 5'-phosphorothioate; note = sugar modification: 2'-O-methoxyethylribose
  modified_base 10: mod_base = OTHER; note = sugar modification: 2'-O-methoxyethylribose; note = backbone modification: 5'-phosphorothioate
  modified_base 11: mod_base = OTHER; note = thymine; note = backbone modification: 5'-phosphorothioate; note = sugar modification: 2'-O-methoxyethylribose
  modified_base 12: mod_base = OTHER; note = thymine; note = backbone modification: 5'-phosphorothioate; note = sugar modification: 2'-O-methoxyethylribose
  modified_base 13: mod_base = OTHER; note = backbone modification: 5'-phosphorothioate; note = sugar modification: 2'-O-methoxyethylribose
  modified_base 14: mod_base = OTHER; note = thymine; note = backbone modification: 5'-phosphorothioate; note = sugar modification: 2'-O-methoxyethylribose
  modified_base 15: mod_base = OTHER; note = backbone modification: 5'-phosphorothioate; note = sugar modification: 2'-O-methoxyethylribose
  modified_base 16: mod_base = OTHER; note = backbone modification: 5'-phosphorothioate; note = thymine; note = sugar modification: 2'-O-methoxyethylribose
  modified_base 17: mod_base = OTHER; note = backbone modification: 5'-phosphorothioate; note = thymine; note = sugar modification: 2'-O-methoxyethylribose
  modified_base 18: mod_base = OTHER; note = sugar modification: 2'-O-methoxyethylribose
cttccagccattgtgttg

SEQ ID NO: 360 - RNA, 18 nt, synthetic construct
  source 1..18: mol_type = other RNA; note = Antisense oligonucleotide
  modified_base 1: mod_base = OTHER; mod_base = m5c; note = backbone modification: 5'-phosphorothioate; note = sugar modification: 2'-O-methoxyethylribose
  modified_base 2: mod_base = OTHER; note = backbone modification: 5'-phosphorothioate; note = sugar modification: 2'-O-methoxyethylribose; note = thymine
  modified_base 3: mod_base = OTHER; note = sugar modification: 2'-O-methoxyethylribose; note = backbone modification: 5'-phosphorothioate; note = thymine
  modified_base 4: mod_base = OTHER; note = sugar modification: 2'-O-methoxyethylribose; note = backbone modification: 5'-phosphorothioate
  modified_base 5: mod_base = OTHER; note = backbone modification: 5'-phosphorothioate; note = sugar modification: 2'-O-methoxyethylribose
  modified_base 6: mod_base = OTHER; mod_base = m5c; note = backbone modification: 5'-phosphorothioate; note = sugar modification: 2'-O-methoxyethylribose
  modified_base 7: mod_base = OTHER; note = sugar modification: 2'-O-methoxyethylribose; note = backbone modification: 5'-phosphorothioate; note = thymine
  modified_base 8: mod_base = OTHER; note = sugar modification: 2'-O-methoxyethylribose; note = backbone modification: 5'-phosphorothioate; note = thymine
  modified_base 9: mod_base = m5c; mod_base = OTHER; note = backbone modification: 5'-phosphorothioate; note = sugar modification: 2'-O-methoxyethylribose
  modified_base 10: mod_base = OTHER; mod_base = m5c; note = sugar modification: 2'-O-methoxyethylribose; note = backbone modification: 5'-phosphorothioate
  modified_base 11: mod_base = OTHER; note = sugar modification: 2'-O-methoxyethylribose; note = backbone modification: 5'-phosphorothioate
  modified_base 12: mod_base = OTHER; note = backbone modification: 5'-phosphorothioate; note = sugar modification: 2'-O-methoxyethylribose
  modified_base 13: mod_base = OTHER; mod_base = m5c; note = backbone modification: 5'-phosphorothioate; note = sugar modification: 2'-O-methoxyethylribose
  modified_base 14: mod_base = OTHER; mod_base = m5c; note = backbone modification: 5'-phosphorothioate; note = sugar modification: 2'-O-methoxyethylribose
  modified_base 15: mod_base = OTHER; note = sugar modification: 2'-O-methoxyethylribose; note = backbone modification: 5'-phosphorothioate
  modified_base 16: mod_base = OTHER; note = backbone modification: 5'-phosphorothioate; note = sugar modification: 2'-O-methoxyethylribose; note = thymine
  modified_base 17: mod_base = OTHER; note = sugar modification: 2'-O-methoxyethylribose; note = backbone modification: 5'-phosphorothioate; note = thymine
  modified_base 18: mod_base = OTHER; note = sugar modification: 2'-O-methoxyethylribose
cttagcttccagccattg

SEQ ID NO: 361 - RNA, 18 nt, synthetic construct
  source 1..18: mol_type = other RNA; note = Antisense oligonucleotide
  modified_base 1: mod_base = OTHER; note = sugar modification: 2'-O-methoxyethylribose; note = thymine; note = backbone modification: 5'-phosphorothioate
  modified_base 2: mod_base = OTHER; mod_base = m5c; note = sugar modification: 2'-O-methoxyethylribose; note = backbone modification: 5'-phosphorothioate
  modified_base 3: mod_base = OTHER; note = backbone modification: 5'-phosphorothioate; note = thymine; note = sugar modification: 2'-O-methoxyethylribose
  modified_base 4: mod_base = OTHER; note = sugar modification: 2'-O-methoxyethylribose; note = backbone modification: 5'-phosphorothioate; note = thymine
  modified_base 5: mod_base = OTHER; mod_base = m5c; note = backbone modification: 5'-phosphorothioate; note = sugar modification: 2'-O-methoxyethylribose
  modified_base 6: mod_base = OTHER; mod_base = m5c; note = backbone modification: 5'-phosphorothioate; note = sugar modification: 2'-O-methoxyethylribose
  modified_base 7: mod_base = OTHER; note = sugar modification: 2'-O-methoxyethylribose; note = backbone modification: 5'-phosphorothioate; note = thymine
  modified_base 8: mod_base = OTHER; note = sugar modification: 2'-O-methoxyethylribose; note = thymine; note = backbone modification: 5'-phosphorothioate
  modified_base 9: mod_base = OTHER; note = backbone modification: 5'-phosphorothioate; note = sugar modification: 2'-O-methoxyethylribose
  modified_base 10: mod_base = OTHER; note = backbone modification: 5'-phosphorothioate; note = sugar modification: 2'-O-methoxyethylribose
  modified_base 11: mod_base = m5c; mod_base = OTHER; note = backbone modification: 5'-phosphorothioate; note = sugar modification: 2'-O-methoxyethylribose
  modified_base 12: mod_base = OTHER; note = thymine; note = backbone modification: 5'-phosphorothioate; note = sugar modification: 2'-O-methoxyethylribose
  modified_base 13: mod_base = OTHER; note = backbone modification: 5'-phosphorothioate; note = thymine; note = sugar modification: 2'-O-methoxyethylribose
  modified_base 14: mod_base = m5c; mod_base = OTHER; note = backbone modification: 5'-phosphorothioate; note = sugar modification: 2'-O-methoxyethylribose
  modified_base 15: mod_base = OTHER; mod_base = m5c; note = backbone modification: 5'-phosphorothioate; note = sugar modification: 2'-O-methoxyethylribose
  modified_base 16: mod_base = OTHER; note = backbone modification: 5'-phosphorothioate; note = sugar modification: 2'-O-methoxyethylribose
  modified_base 17: mod_base = OTHER; note = sugar modification: 2'-O-methoxyethylribose; note = backbone modification: 5'-phosphorothioate
  modified_base 18: mod_base = m5c; mod_base = OTHER; note = sugar modification: 2'-O-methoxyethylribose
tcttccttagcttccagc

SEQ ID NO: 362 - RNA, 18 nt, synthetic construct
  source 1..18: mol_type = other RNA; note = Antisense oligonucleotide
  modified_base 1: mod_base = OTHER; mod_base = m5c; note = sugar modification: 2'-O-methoxyethylribose; note = backbone modification: 5'-phosphorothioate
  modified_base 2: mod_base = OTHER; note = sugar modification: 2'-O-methoxyethylribose; note = backbone modification: 5'-phosphorothioate
  modified_base 3: mod_base = OTHER; note = backbone modification: 5'-phosphorothioate; note = sugar modification: 2'-O-methoxyethylribose
  modified_base 4: mod_base = OTHER; mod_base = m5c; note = sugar modification: 2'-O-methoxyethylribose; note = backbone modification: 5'-phosphorothioate
  modified_base 5: mod_base = OTHER; note = sugar modification: 2'-O-methoxyethylribose; note = backbone modification: 5'-phosphorothioate; note = thymine
  modified_base 6: mod_base = OTHER; note = thymine; note = sugar modification: 2'-O-methoxyethylribose; note = backbone modification: 5'-phosphorothioate
  modified_base 7: mod_base = OTHER; mod_base = m5c; note = backbone modification: 5'-phosphorothioate; note = sugar modification: 2'-O-methoxyethylribose
  modified_base 8: mod_base = OTHER; note = thymine; note = backbone modification: 5'-phosphorothioate; note = sugar modification: 2'-O-methoxyethylribose
  modified_base 9: mod_base = OTHER; note = thymine; note = backbone modification: 5'-phosphorothioate; note = sugar modification: 2'-O-methoxyethylribose
  modified_base 10: mod_base = OTHER; mod_base = m5c; note = sugar modification: 2'-O-methoxyethylribose; note = backbone modification: 5'-phosphorothioate
  modified_base 11: mod_base = m5c; mod_base = OTHER; note = sugar modification: 2'-O-methoxyethylribose; note = backbone modification: 5'-phosphorothioate
  modified_base 12: mod_base = OTHER; note = backbone modification: 5'-phosphorothioate; note = sugar modification: 2'-O-methoxyethylribose; note = thymine
  modified_base 13: mod_base = OTHER; note = thymine; note = backbone modification: 5'-phosphorothioate; note = sugar modification: 2'-O-methoxyethylribose
  modified_base 14: mod_base = OTHER; note = backbone modification: 5'-phosphorothioate; note = sugar modification: 2'-O-methoxyethylribose
  modified_base 15: mod_base = OTHER; note = sugar modification: 2'-O-methoxyethylribose; note = backbone modification: 5'-phosphorothioate
  modified_base 16: mod_base = OTHER; mod_base = m5c; note = backbone modification: 5'-phosphorothioate; note = sugar modification: 2'-O-methoxyethylribose
  modified_base 17: mod_base = OTHER; note = thymine; note = backbone modification: 5'-phosphorothioate; note = sugar modification: 2'-O-methoxyethylribose
  modified_base 18: mod_base = OTHER; note = sugar modification: 2'-O-methoxyethylribose; note = thymine
cagcttcttccttagctt

SEQ ID NO: 363 - RNA, 18 nt, synthetic construct
  source 1..18: mol_type = other RNA; note = Antisense oligonucleotide
  modified_base 1: mod_base = OTHER; mod_base = m5c; note = sugar modification: 2'-O-methoxyethylribose; note = backbone modification: 5'-phosphorothioate
  modified_base 2: mod_base = OTHER; note = sugar modification: 2'-O-methoxyethylribose; note = thymine; note = backbone modification: 5'-phosphorothioate
  modified_base 3: mod_base = OTHER; note = sugar modification: 2'-O-methoxyethylribose; note = backbone modification: 5'-phosphorothioate
  modified_base 4: mod_base = m5c; mod_base = OTHER; note = backbone modification: 5'-phosphorothioate; note = sugar modification: 2'-O-methoxyethylribose
  modified_base 5: mod_base = OTHER; note = sugar modification: 2'-O-methoxyethylribose; note = thymine; note = backbone modification: 5'-phosphorothioate
  modified_base 6: mod_base = m5c; mod_base = OTHER; note = sugar modification: 2'-O-methoxyethylribose; note = backbone modification: 5'-phosphorothioate
  modified_base 7: mod_base = OTHER; note = sugar modification: 2'-O-methoxyethylribose; note = backbone modification: 5'-phosphorothioate
  modified_base 8: mod_base = OTHER; note = backbone modification: 5'-phosphorothioate; note = sugar modification: 2'-O-methoxyethylribose
  modified_base 9: mod_base = OTHER; mod_base = m5c; note = backbone modification: 5'-phosphorothioate; note = sugar modification: 2'-O-methoxyethylribose
  modified_base 10: mod_base = OTHER; note = sugar modification: 2'-O-methoxyethylribose; note = backbone modification: 5'-phosphorothioate; note = thymine
  modified_base 11: mod_base = OTHER; note = backbone modification: 5'-phosphorothioate; note = thymine; note = sugar modification: 2'-O-methoxyethylribose
  modified_base 12: mod_base = OTHER; mod_base = m5c; note = sugar modification: 2'-O-methoxyethylribose; note = backbone modification: 5'-phosphorothioate
  modified_base 13: mod_base = OTHER; note = thymine; note = sugar modification: 2'-O-methoxyethylribose; note = backbone modification: 5'-phosphorothioate
  modified_base 14: mod_base = OTHER; note = thymine; note = backbone modification: 5'-phosphorothioate; note = sugar modification: 2'-O-methoxyethylribose
  modified_base 15: mod_base = m5c; mod_base = OTHER; note = sugar modification: 2'-O-methoxyethylribose; note = backbone modification: 5'-phosphorothioate
  modified_base 16: mod_base = OTHER; mod_base = m5c; note = sugar modification: 2'-O-methoxyethylribose; note = backbone modification: 5'-phosphorothioate
  modified_base 17: mod_base = OTHER; note = backbone modification: 5'-phosphorothioate; note = sugar modification: 2'-O-methoxyethylribose; note = thymine
  modified_base 18: mod_base = OTHER; note = sugar modification: 2'-O-methoxyethylribose; note = thymine
ctgctcagcttcttcctt

SEQ ID NO: 364 - RNA, 18 nt, synthetic construct
  source 1..18: mol_type = other RNA; note = Antisense oligonucleotide
  modified_base 1: mod_base = OTHER; note = backbone modification: 5'-phosphorothioate; note = sugar modification: 2'-O-methoxyethylribose
  modified_base 2: mod_base = OTHER; note = backbone modification: 5'-phosphorothioate; note = sugar modification: 2'-O-methoxyethylribose
  modified_base 3: mod_base = OTHER; note = backbone modification: 5'-phosphorothioate; note = sugar modification: 2'-O-methoxyethylribose
  modified_base 4: mod_base = OTHER; note = sugar modification: 2'-O-methoxyethylribose; note = backbone modification: 5'-phosphorothioate
  modified_base 5: mod_base = OTHER; mod_base = m5c; note = sugar modification: 2'-O-methoxyethylribose; note = backbone modification: 5'-phosphorothioate
  modified_base 6: mod_base = OTHER; mod_base = m5c; note = sugar modification: 2'-O-methoxyethylribose; note = backbone modification: 5'-phosphorothioate
  modified_base 7: mod_base = OTHER; note = sugar modification: 2'-O-methoxyethylribose; note = backbone modification: 5'-phosphorothioate; note = thymine
  modified_base 8: mod_base = OTHER; note = backbone modification: 5'-phosphorothioate; note = sugar modification: 2'-O-methoxyethylribose
  modified_base 9: mod_base = OTHER; mod_base = m5c; note = backbone modification: 5'-phosphorothioate; note = sugar modification: 2'-O-methoxyethylribose
  modified_base 10: mod_base = OTHER; note = sugar modification: 2'-O-methoxyethylribose; note = backbone modification: 5'-phosphorothioate; note = thymine
  modified_base 11: mod_base = OTHER; mod_base = m5c; note = backbone modification: 5'-phosphorothioate; note = sugar modification: 2'-O-methoxyethylribose
  modified_base 12: mod_base = OTHER; note = backbone modification: 5'-phosphorothioate; note = sugar modification: 2'-O-methoxyethylribose
  modified_base 13: mod_base = OTHER; note = backbone modification: 5'-phosphorothioate; note = sugar modification: 2'-O-methoxyethylribose
  modified_base 14: mod_base = m5c; mod_base = OTHER; note = backbone modification: 5'-phosphorothioate; note = sugar modification: 2'-O-methoxyethylribose
  modified_base 15: mod_base = OTHER; note = thymine; note = sugar modification: 2'-O-methoxyethylribose; note = backbone modification: 5'-phosphorothioate
  modified_base 16: mod_base = OTHER; note = thymine; note = sugar modification: 2'-O-methoxyethylribose; note = backbone modification: 5'-phosphorothioate
  modified_base 17: mod_base = OTHER; mod_base = m5c; note = backbone modification: 5'-phosphorothioate; note = sugar modification: 2'-O-methoxyethylribose
  modified_base 18: mod_base = OTHER; note = sugar modification: 2'-O-methoxyethylribose; note = thymine
aagacctgctcagcttct

SEQ ID NO: 365 - RNA, 18 nt, synthetic construct
  source 1..18: mol_type = other RNA; note = Antisense oligonucleotide
  modified_base 1: mod_base = OTHER; note = backbone modification: 5'-phosphorothioate; note = sugar modification: 2'-O-methoxyethylribose
  modified_base 2: mod_base = OTHER; note = backbone modification: 5'-phosphorothioate; note = sugar modification: 2'-O-methoxyethylribose; note = thymine
  modified_base 3: mod_base = OTHER; mod_base = m5c; note = backbone modification: 5'-phosphorothioate; note = sugar modification: 2'-O-methoxyethylribose
  modified_base 4: mod_base = m5c; mod_base = OTHER; note = sugar modification: 2'-O-methoxyethylribose; note = backbone modification: 5'-phosphorothioate
  modified_base 5: mod_base = OTHER; note = thymine; note = backbone modification: 5'-phosphorothioate; note = sugar modification: 2'-O-methoxyethylribose
  modified_base 6: mod_base = OTHER; note = backbone modification: 5'-phosphorothioate; note = sugar modification: 2'-O-methoxyethylribose
  modified_base 7: mod_base = OTHER; note = sugar modification: 2'-O-methoxyethylribose; note = backbone modification: 5'-phosphorothioate
  modified_base 8: mod_base = OTHER; note = sugar modification: 2'-O-methoxyethylribose; note = backbone modification: 5'-phosphorothioate
  modified_base 9: mod_base = OTHER; note = backbone modification: 5'-phosphorothioate; note = sugar modification: 2'-O-methoxyethylribose
  modified_base 10: mod_base = m5c; mod_base = OTHER; note = backbone modification: 5'-phosphorothioate; note = sugar modification: 2'-O-methoxyethylribose
  modified_base 11: mod_base = m5c; mod_base = OTHER; note = sugar modification: 2'-O-methoxyethylribose; note = backbone modification: 5'-phosphorothioate
  modified_base 12: mod_base = OTHER; note = sugar modification: 2'-O-methoxyethylribose; note = thymine; note = backbone modification: 5'-phosphorothioate
  modified_base 13: mod_base = OTHER; note = backbone modification: 5'-phosphorothioate; note = sugar modification: 2'-O-methoxyethylribose
  modified_base 14: mod_base = m5c; mod_base = OTHER; note = sugar modification: 2'-O-methoxyethylribose; note = backbone modification: 5'-phosphorothioate
  modified_base 15: mod_base = OTHER; note = backbone modification: 5'-phosphorothioate; note = sugar modification: 2'-O-methoxyethylribose; note = thymine
  modified_base 16: mod_base = m5c; mod_base = OTHER; note = sugar modification: 2'-O-methoxyethylribose; note = backbone modification: 5'-phosphorothioate
  modified_base 17: mod_base = OTHER; note = sugar modification: 2'-O-methoxyethylribose; note = backbone modification: 5'-phosphorothioate
  modified_base 18: mod_base = OTHER; note = sugar modification: 2'-O-methoxyethylribose
gtcctaagacctgctcag

SEQ ID NO: 366 - RNA, 18 nt, synthetic construct
  source 1..18: mol_type = other RNA; note = Antisense oligonucleotide
  modified_base 1: mod_base = OTHER; note = sugar modification: 2'-O-methoxyethylribose; note = backbone modification: 5'-phosphorothioate
  modified_base 2: mod_base = OTHER; note = sugar modification: 2'-O-methoxyethylribose; note = backbone modification: 5'-phosphorothioate
  modified_base 3: mod_base = OTHER; mod_base = m5c; note = backbone modification: 5'-phosphorothioate; note = sugar modification: 2'-O-methoxyethylribose
  modified_base 4: mod_base = OTHER; mod_base = m5c; note = sugar modification: 2'-O-methoxyethylribose; note = backbone modification: 5'-phosphorothioate
  modified_base 5: mod_base = OTHER; note = backbone modification: 5'-phosphorothioate; note = thymine; note = sugar modification: 2'-O-methoxyethylribose
  modified_base 6: mod_base = OTHER; note = backbone modification: 5'-phosphorothioate; note = sugar modification: 2'-O-methoxyethylribose
  modified_base 7: mod_base = OTHER; note = backbone modification: 5'-phosphorothioate; note = sugar modification: 2'-O-methoxyethylribose; note = thymine
  modified_base 8: mod_base = m5c; mod_base = OTHER; note = backbone modification: 5'-phosphorothioate; note = sugar modification: 2'-O-methoxyethylribose
  modified_base 9: mod_base = m5c; mod_base = OTHER; note = sugar modification: 2'-O-methoxyethylribose; note = backbone modification: 5'-phosphorothioate
  modified_base 10: mod_base = OTHER; note = thymine; note = sugar modification: 2'-O-methoxyethylribose; note = backbone modification: 5'-phosphorothioate
  modified_base 11: mod_base = OTHER; note = sugar modification: 2'-O-methoxyethylribose; note = backbone modification: 5'-phosphorothioate
  modified_base 12: mod_base = OTHER; note = backbone modification: 5'-phosphorothioate; note = sugar modification: 2'-O-methoxyethylribose
  modified_base 13: mod_base = OTHER; note = backbone modification: 5'-phosphorothioate; note = sugar modification: 2'-O-methoxyethylribose
  modified_base 14: mod_base = OTHER; note = sugar modification: 2'-O-methoxyethylribose; note = backbone modification: 5'-phosphorothioate
  modified_base 15: mod_base = OTHER; mod_base = m5c; note = sugar modification: 2'-O-methoxyethylribose; note = backbone modification: 5'-phosphorothioate
  modified_base 16: mod_base = OTHER; mod_base = m5c; note = backbone modification: 5'-phosphorothioate; note = sugar modification: 2'-O-methoxyethylribose
  modified_base 17: mod_base = OTHER; note = thymine; note = backbone modification: 5'-phosphorothioate; note = sugar modification: 2'-O-methoxyethylribose
  modified_base 18: mod_base = OTHER; note = sugar modification: 2'-O-methoxyethylribose
ggcctgtcctaagacctg

SEQ ID NO: 367 - RNA, 18 nt, synthetic construct
  source 1..18: mol_type = other RNA; note = Antisense oligonucleotide
  modified_base 1: mod_base = OTHER; note = backbone modification: 5'-phosphorothioate; note = sugar modification: 2'-O-methoxyethylribose
  modified_base 2: mod_base = OTHER; mod_base = m5c; note = sugar modification: 2'-O-methoxyethylribose; note = backbone modification: 5'-phosphorothioate
  modified_base 3: mod_base = OTHER; note = sugar modification: 2'-O-methoxyethylribose; note = backbone modification: 5'-phosphorothioate; note = thymine
  modified_base 4: mod_base = OTHER; mod_base = m5c; note = backbone modification: 5'-phosphorothioate; note = sugar modification: 2'-O-methoxyethylribose
  modified_base 5: mod_base = OTHER; note = thymine; note = backbone modification: 5'-phosphorothioate; note = sugar modification: 2'-O-methoxyethylribose
  modified_base 6: mod_base = OTHER; note = sugar modification: 2'-O-methoxyethylribose; note = backbone modification: 5'-phosphorothioate
  modified_base 7: mod_base = OTHER; note = sugar modification: 2'-O-methoxyethylribose; note = backbone modification: 5'-phosphorothioate
  modified_base 8: mod_base = m5c; mod_base = OTHER; note = sugar modification: 2'-O-methoxyethylribose; note = backbone modification: 5'-phosphorothioate
  modified_base 9: mod_base = m5c; mod_base = OTHER; note = sugar modification: 2'-O-methoxyethylribose; note = backbone modification: 5'-phosphorothioate
  modified_base 10: mod_base = OTHER; note = thymine; note = backbone modification: 5'-phosphorothioate; note = sugar modification: 2'-O-methoxyethylribose
  modified_base 11: mod_base = OTHER; note = sugar modification: 2'-O-methoxyethylribose; note = backbone modification: 5'-phosphorothioate
  modified_base 12: mod_base = OTHER; note = sugar modification: 2'-O-methoxyethylribose; note = backbone modification: 5'-phosphorothioate; note = thymine
  modified_base 13: mod_base = m5c; mod_base = OTHER; note = sugar modification: 2'-O-methoxyethylribose; note = backbone modification: 5'-phosphorothioate
  modified_base 14: mod_base = OTHER; mod_base = m5c; note = backbone modification: 5'-phosphorothioate; note = sugar modification: 2'-O-methoxyethylribose
  modified_base 15: mod_base = OTHER; note = backbone modification: 5'-phosphorothioate; note = thymine; note = sugar modification: 2'-O-methoxyethylribose
  modified_base 16: mod_base = OTHER; note = sugar modification: 2'-O-methoxyethylribose; note = backbone modification: 5'-phosphorothioate
  modified_base 17: mod_base = OTHER; note = backbone modification: 5'-phosphorothioate; note = sugar modification: 2'-O-methoxyethylribose
  modified_base 18: mod_base = OTHER; note = sugar modification: 2'-O-methoxyethylribose
gctctggcctgtcctaag

SEQ ID NO: 368 - RNA, 18 nt, synthetic construct
  source 1..18: mol_type = other RNA; note = Antisense oligonucleotide
  modified_base 1: mod_base = OTHER; note = sugar modification: 2'-O-methoxyethylribose; note = backbone modification: 5'-phosphorothioate
  modified_base 2: mod_base = OTHER; mod_base = m5c; note = backbone modification: 5'-phosphorothioate; note = sugar modification: 2'-O-methoxyethylribose
  modified_base 3: mod_base = OTHER; note = backbone modification: 5'-phosphorothioate; note = thymine; note = sugar modification: 2'-O-methoxyethylribose
  modified_base 4: mod_base = OTHER; note = backbone modification: 5'-phosphorothioate; note = sugar modification: 2'-O-methoxyethylribose; note = thymine
  modified_base 5: mod_base = OTHER; note = sugar modification: 2'-O-methoxyethylribose; note = backbone modification: 5'-phosphorothioate
  modified_base 6: mod_base = OTHER; note = sugar modification: 2'-O-methoxyethylribose; note = backbone modification: 5'-phosphorothioate
  modified_base 7: mod_base = OTHER; mod_base = m5c; note = sugar modification: 2'-O-methoxyethylribose; note = backbone modification: 5'-phosphorothioate
  modified_base 8: mod_base = OTHER; note = thymine; note = sugar modification: 2'-O-methoxyethylribose; note = backbone modification: 5'-phosphorothioate
  modified_base 9: mod_base = m5c; mod_base = OTHER; note = sugar modification: 2'-O-methoxyethylribose; note = backbone modification: 5'-phosphorothioate
  modified_base 10: mod_base = OTHER; note = thymine; note = backbone modification: 5'-phosphorothioate; note = sugar modification: 2'-O-methoxyethylribose
  modified_base 11: mod_base = OTHER; note = sugar modification: 2'-O-methoxyethylribose; note = backbone modification: 5'-phosphorothioate
  modified_base 12: mod_base = OTHER; note = sugar modification: 2'-O-methoxyethylribose; note = backbone modification: 5'-phosphorothioate
  modified_base 13: mod_base = m5c; mod_base = OTHER; note = sugar modification: 2'-O-methoxyethylribose; note = backbone modification: 5'-phosphorothioate
  modified_base 14: mod_base = OTHER; mod_base = m5c; note = backbone modification: 5'-phosphorothioate; note = sugar modification: 2'-O-methoxyethylribose
  modified_base 15: mod_base = OTHER; note = thymine; note = sugar modification: 2'-O-methoxyethylribose; note = backbone modification: 5'-phosphorothioate
  modified_base 16: mod_base = OTHER; note = sugar modification: 2'-O-methoxyethylribose; note = backbone modification: 5'-phosphorothioate
  modified_base 17: mod_base = OTHER; note = thymine; note = sugar modification: 2'-O-methoxyethylribose; note = backbone modification: 5'-phosphorothioate
  modified_base 18: mod_base = m5c; mod_base = OTHER; note = sugar modification: 2'-O-methoxyethylribose
gcttggctctggcctgtc

SEQ ID NO: 369 - RNA, 18 nt, synthetic construct
  source 1..18: mol_type = other RNA; note = Antisense oligonucleotide
  modified_base 1: mod_base = OTHER; mod_base = m5c; note = backbone modification: 5'-phosphorothioate; note = sugar modification: 2'-O-methoxyethylribose
  modified_base 2: mod_base = OTHER; note = backbone modification: 5'-phosphorothioate; note = thymine; note = sugar modification: 2'-O-methoxyethylribose
  modified_base 3: mod_base = m5c; mod_base = OTHER; note = backbone modification: 5'-phosphorothioate; note = sugar modification: 2'-O-methoxyethylribose
  modified_base 4: mod_base = OTHER; note = backbone modification: 5'-phosphorothioate; note = sugar modification: 2'-O-methoxyethylribose
  modified_base 5: mod_base = OTHER; note = backbone modification: 5'-phosphorothioate; note = sugar modification: 2'-O-methoxyethylribose
  modified_base 6: mod_base = OTHER; note = backbone modification: 5'-phosphorothioate; note = sugar modification: 2'-O-methoxyethylribose
  modified_base 7: mod_base = m5c; mod_base = OTHER; note = backbone modification: 5'-phosphorothioate; note = sugar modification: 2'-O-methoxyethylribose
  modified_base 8: mod_base = OTHER; note = thymine; note = backbone modification: 5'-phosphorothioate; note = sugar modification: 2'-O-methoxyethylribose
  modified_base 9: mod_base = OTHER; note = thymine; note = backbone modification: 5'-phosphorothioate; note = sugar modification: 2'-O-methoxyethylribose
  modified_base 10: mod_base = OTHER; note = sugar modification: 2'-O-methoxyethylribose; note = backbone modification: 5'-phosphorothioate
  modified_base 11: mod_base = OTHER; note = backbone modification: 5'-phosphorothioate; note = sugar modification: 2'-O-methoxyethylribose
  modified_base 12: mod_base = OTHER; mod_base = m5c; note = backbone modification: 5'-phosphorothioate; note = sugar modification: 2'-O-methoxyethylribose
  modified_base 13: mod_base = OTHER; note = backbone modification: 5'-phosphorothioate; note = thymine; note = sugar modification: 2'-O-methoxyethylribose
  modified_base 14: mod_base = OTHER; mod_base = m5c; note = backbone modification: 5'-phosphorothioate; note = sugar modification: 2'-O-methoxyethylribose
  modified_base 15: mod_base = OTHER; note = sugar modification: 2'-O-methoxyethylribose; note = backbone modification: 5'-phosphorothioate; note = thymine
  modified_base 16: mod_base = OTHER; note = sugar modification: 2'-O-methoxyethylribose; note = backbone modification: 5'-phosphorothioate
  modified_base 17: mod_base = OTHER; note = backbone modification: 5'-phosphorothioate; note = sugar modification: 2'-O-methoxyethylribose
  modified_base 18: mod_base = m5c; mod_base = OTHER; note = sugar modification: 2'-O-methoxyethylribose
ctcaagcttggctctggc

SEQ ID NO: 370 - RNA, 18 nt, synthetic construct
  source 1..18: mol_type = other RNA; note = Antisense oligonucleotide
  modified_base 1: mod_base = m5c; mod_base = OTHER; note = sugar modification: 2'-O-methoxyethylribose; note = backbone modification: 5'-phosphorothioate
  modified_base 2: mod_base = OTHER; note = backbone modification: 5'-phosphorothioate; note = sugar modification: 2'-O-methoxyethylribose
  modified_base 3: mod_base = OTHER; note = thymine; note = backbone modification: 5'-phosphorothioate; note = sugar modification: 2'-O-methoxyethylribose
  modified_base 4: mod_base = OTHER; note = sugar modification: 2'-O-methoxyethylribose; note = backbone modification: 5'-phosphorothioate
  modified_base 5: mod_base = OTHER; note = sugar modification: 2'-O-methoxyethylribose; note = backbone modification: 5'-phosphorothioate
  modified_base 6: mod_base = OTHER; mod_base = m5c; note = sugar modification: 2'-O-methoxyethylribose; note = backbone modification: 5'-phosphorothioate
  modified_base 7: mod_base = OTHER; note = sugar modification: 2'-O-methoxyethylribose; note = backbone modification: 5'-phosphorothioate; note = thymine
  modified_base 8: mod_base = OTHER; mod_base = m5c; note = sugar modification: 2'-O-methoxyethylribose; note = backbone modification: 5'-phosphorothioate
  modified_base 9: mod_base = OTHER; note = sugar modification: 2'-O-methoxyethylribose; note = backbone modification: 5'-phosphorothioate
  modified_base 10: mod_base = OTHER; note = backbone modification: 5'-phosphorothioate; note = sugar modification: 2'-O-methoxyethylribose
  modified_base 11: mod_base = OTHER; note = sugar modification: 2'-O-methoxyethylribose; note = backbone modification: 5'-phosphorothioate
  modified_base 12: mod_base = OTHER; mod_base = m5c; note = backbone modification: 5'-phosphorothioate; note = sugar modification: 2'-O-methoxyethylribose
  modified_base 13: mod_base = OTHER; note = thymine; note = backbone modification: 5'-phosphorothioate; note = sugar modification: 2'-O-methoxyethylribose
  modified_base 14: mod_base = OTHER; note = thymine; note = sugar modification: 2'-O-methoxyethylribose; note = backbone modification: 5'-phosphorothioate
  modified_base 15: mod_base = OTHER; note = backbone modification: 5'-phosphorothioate; note = sugar modification: 2'-O-methoxyethylribose
  modified_base 16: mod_base = OTHER; note = backbone modification: 5'-phosphorothioate; note = sugar modification: 2'-O-methoxyethylribose
  modified_base 17: mod_base = OTHER; mod_base = m5c; note = backbone modification: 5'-phosphorothioate; note = sugar modification: 2'-O-methoxyethylribose
  modified_base 18: mod_base = OTHER; note = thymine; note = sugar modification: 2'-O-methoxyethylribose
catgactcaagcttggct

SEQ ID NO: 371 - RNA, 18 nt, synthetic construct
  source 1..18: mol_type = other RNA; note = Antisense oligonucleotide
  modified_base 1: mod_base = m5c; mod_base = OTHER; note = sugar modification: 2'-O-methoxyethylribose; note = backbone modification: 5'-phosphorothioate
  modified_base 2: mod_base = m5c; mod_base = OTHER; note = sugar modification: 2'-O-methoxyethylribose; note = backbone modification: 5'-phosphorothioate
  modified_base 3: mod_base = OTHER; note = backbone modification: 5'-phosphorothioate; note = sugar modification: 2'-O-methoxyethylribose; note = thymine
  modified_base 4: mod_base = OTHER; note = backbone modification: 5'-phosphorothioate; note = thymine; note = sugar modification: 2'-O-methoxyethylribose
  modified_base 5: mod_base = OTHER; mod_base = m5c; note = backbone modification: 5'-phosphorothioate; note = sugar modification: 2'-O-methoxyethylribose
  modified_base 6: mod_base = m5c; mod_base = OTHER; note = backbone modification: 5'-phosphorothioate; note = sugar modification: 2'-O-methoxyethylribose
  modified_base 7: mod_base = OTHER; note = backbone modification: 5'-phosphorothioate; note = sugar modification: 2'-O-methoxyethylribose
  modified_base 8: mod_base = OTHER; note = thymine; note = sugar modification: 2'-O-methoxyethylribose; note = backbone modification: 5'-phosphorothioate
  modified_base 9: mod_base = OTHER; note = sugar modification: 2'-O-methoxyethylribose; note = backbone modification: 5'-phosphorothioate
  modified_base 10: mod_base = OTHER; note = sugar modification: 2'-O-methoxyethylribose; note = backbone modification: 5'-phosphorothioate
  modified_base 11: mod_base = m5c; mod_base = OTHER; note = backbone modification: 5'-phosphorothioate; note = sugar modification: 2'-O-methoxyethylribose
  modified_base 12: mod_base = OTHER; note = thymine; note = backbone modification: 5'-phosphorothioate; note = sugar modification: 2'-O-methoxyethylribose
  modified_base 13: mod_base = m5c; mod_base = OTHER; note = sugar modification: 2'-O-methoxyethylribose; note = backbone modification: 5'-phosphorothioate
  modified_base 14: mod_base = OTHER; note = sugar modification: 2'-O-methoxyethylribose; note = backbone modification: 5'-phosphorothioate
  modified_base 15: mod_base = OTHER; note = backbone modification: 5'-phosphorothioate; note = sugar modification: 2'-O-methoxyethylribose
  modified_base 16: mod_base = OTHER; note = sugar modification: 2'-O-methoxyethylribose; note = backbone modification: 5'-phosphorothioate
  modified_base 17: mod_base = OTHER; mod_base = m5c; note = backbone modification: 5'-phosphorothioate; note = sugar modification: 2'-O-methoxyethylribose
  modified_base 18: mod_base = OTHER; note = sugar modification: 2'-O-methoxyethylribose; note = thymine
ccttccatgactcaagct

SEQ ID NO: 372 - RNA, 18 nt, synthetic construct
  source 1..18: mol_type = other RNA; note = Antisense oligonucleotide
  modified_base 1: mod_base = OTHER; note = backbone modification: 5'-phosphorothioate; note = sugar modification: 2'-O-methoxyethylribose
  modified_base 2: mod_base = OTHER; mod_base = m5c; note = backbone modification: 5'-phosphorothioate; note = sugar modification: 2'-O-methoxyethylribose
  modified_base 3: mod_base = m5c; mod_base = OTHER; note = backbone modification: 5'-phosphorothioate; note = sugar modification: 2'-O-methoxyethylribose
  modified_base 4: mod_base = m5c; mod_base = OTHER; note = sugar modification: 2'-O-methoxyethylribose; note = backbone modification: 5'-phosphorothioate
  modified_base 5: mod_base = OTHER; note = sugar modification: 2'-O-methoxyethylribose; note = thymine; note = backbone modification: 5'-phosphorothioate
  modified_base 6: mod_base = m5c; mod_base = OTHER; note = sugar modification: 2'-O-methoxyethylribose; note = backbone modification: 5'-phosphorothioate
  modified_base 7: mod_base = m5c; mod_base = OTHER; note = backbone modification: 5'-phosphorothioate; note = sugar modification: 2'-O-methoxyethylribose
  modified_base 8: mod_base = OTHER; note = thymine; note = backbone modification: 5'-phosphorothioate; note = sugar modification: 2'-O-methoxyethylribose
  modified_base 9: mod_base = OTHER; note = thymine; note = sugar modification: 2'-O-methoxyethylribose; note = backbone modification: 5'-phosphorothioate
  modified_base 10: mod_base = OTHER; mod_base = m5c; note = backbone modification: 5'-phosphorothioate; note = sugar modification: 2'-O-methoxyethylribose
  modified_base 11: mod_base = m5c; mod_base = OTHER; note = backbone modification: 5'-phosphorothioate; note = sugar modification: 2'-O-methoxyethylribose
  modified_base 12: mod_base = OTHER; note = backbone modification: 5'-phosphorothioate; note = sugar modification: 2'-O-methoxyethylribose
  modified_base 13: mod_base = OTHER; note = backbone modification: 5'-phosphorothioate; note = sugar modification: 2'-O-methoxyethylribose; note = thymine
  modified_base 14: mod_base = OTHER; note = backbone modification: 5'-phosphorothioate; note = sugar modification: 2'-O-methoxyethylribose
  modified_base 15: mod_base = OTHER; note = backbone modification: 5'-phosphorothioate; note = sugar modification: 2'-O-methoxyethylribose
  modified_base 16: mod_base = OTHER; mod_base = m5c; note = backbone modification: 5'-phosphorothioate; note = sugar modification: 2'-O-methoxyethylribose
  modified_base 17: mod_base = OTHER; note = backbone modification: 5'-phosphorothioate; note = thymine; note = sugar modification: 2'-O-methoxyethylribose
  modified_base 18: mod_base = m5c; mod_base = OTHER; note = sugar modification: 2'-O-methoxyethylribose
accctccttccatgactc

SEQ ID NO: 373 - RNA, 18 nt, synthetic construct
  source 1..18: mol_type = other RNA; note = Antisense oligonucleotide
  modified_base 1: mod_base = OTHER; note = sugar modification: 2'-O-methoxyethylribose; note = backbone modification: 5'-phosphorothioate; note = thymine
  modified_base 2: mod_base = OTHER; note = sugar modification: 2'-O-methoxyethylribose; note = backbone modification: 5'-phosphorothioate
  modified_base 3: mod_base = OTHER; note = backbone modification: 5'-phosphorothioate; note = sugar modification: 2'-O-methoxyethylribose
  modified_base 4: mod_base = OTHER; note = backbone modification: 5'-phosphorothioate; note = sugar modification: 2'-O-methoxyethylribose
  modified_base 5: mod_base = OTHER; note = backbone modification: 5'-phosphorothioate; note = sugar modification: 2'-O-methoxyethylribose
  modified_base 6: mod_base = OTHER; note = backbone modification: 5'-phosphorothioate; note = sugar modification: 2'-O-methoxyethylribose
  modified_base 7: mod_base = m5c; mod_base = OTHER; note = backbone modification: 5'-phosphorothioate; note = sugar modification: 2'-O-methoxyethylribose
  modified_base 8: mod_base = m5c; mod_base = OTHER; note = backbone modification: 5'-phosphorothioate; note = sugar modification: 2'-O-methoxyethylribose
  modified_base 9: mod_base = OTHER; mod_base = m5c; note = backbone modification: 5'-phosphorothioate; note = sugar modification: 2'-O-methoxyethylribose
  modified_base 10: mod_base = OTHER; note = thymine; note = backbone modification: 5'-phosphorothioate; note = sugar modification: 2'-O-methoxyethylribose
  modified_base 11: mod_base = m5c; mod_base = OTHER; note = backbone modification: 5'-phosphorothioate; note = sugar modification: 2'-O-methoxyethylribose
  modified_base 12: mod_base = OTHER; mod_base = m5c; note = backbone modification: 5'-phosphorothioate; note = sugar modification: 2'-O-methoxyethylribose
  modified_base 13: mod_base = OTHER; note = sugar modification: 2'-O-methoxyethylribose; note = backbone modification: 5'-phosphorothioate; note = thymine
  modified_base 14: mod_base = OTHER; note = thymine; note = sugar modification: 2'-O-methoxyethylribose; note = backbone modification: 5'-phosphorothioate
  modified_base 15: mod_base = m5c; mod_base = OTHER; note = sugar modification: 2'-O-methoxyethylribose; note = backbone modification: 5'-phosphorothioate
  modified_base 16: mod_base = m5c; mod_base = OTHER; note = sugar modification: 2'-O-methoxyethylribose; note = backbone modification: 5'-phosphorothioate
  modified_base 17: mod_base = OTHER; note = sugar modification: 2'-O-methoxyethylribose; note = backbone modification: 5'-phosphorothioate
  modified_base 18: mod_base = OTHER; note = sugar modification: 2'-O-methoxyethylribose; note = thymine
tagggaccctccttccat

SEQ ID NO: 374 - RNA, 18 nt, synthetic construct
  source 1..18: mol_type = other RNA; note = Antisense oligonucleotide
  modified_base 1: mod_base = m5c; mod_base = OTHER; note = sugar modification: 2'-O-methoxyethylribose; note = backbone modification: 5'-phosphorothioate
  modified_base 2: mod_base = OTHER; note = backbone modification: 5'-phosphorothioate; note = sugar modification: 2'-O-methoxyethylribose; note = thymine
  modified_base 3: mod_base = OTHER; note = backbone modification: 5'-phosphorothioate; note = sugar modification: 2'-O-methoxyethylribose
  modified_base 4: mod_base = OTHER; note = thymine; note = sugar modification: 2'-O-methoxyethylribose; note = backbone modification: 5'-phosphorothioate
  modified_base 5: mod_base = OTHER; note = backbone modification: 5'-phosphorothioate; note = sugar modification: 2'-O-methoxyethylribose
  modified_base 6: mod_base = OTHER; note = sugar modification: 2'-O-methoxyethylribose; note = thymine; note = backbone modification: 5'-phosphorothioate
  modified_base 7: mod_base = OTHER; note = sugar modification: 2'-O-methoxyethylribose; note = backbone modification: 5'-phosphorothioate
  modified_base 8: mod_base = OTHER; note = sugar modification: 2'-O-methoxyethylribose; note = backbone modification: 5'-phosphorothioate
  modified_base 9: mod_base = OTHER; note = backbone modification: 5'-phosphorothioate; note = sugar modification: 2'-O-methoxyethylribose
  modified_base 10: mod_base = OTHER; note = sugar modification: 2'-O-methoxyethylribose; note = backbone modification: 5'-phosphorothioate
  modified_base 11: mod_base = OTHER; note = sugar modification: 2'-O-methoxyethylribose; note = backbone modification: 5'-phosphorothioate
  modified_base 12: mod_base = OTHER; mod_base = m5c; note = backbone modification: 5'-phosphorothioate; note = sugar modification: 2'-O-methoxyethylribose
  modified_base 13: mod_base = OTHER; mod_base = m5c; note = backbone modification: 5'-phosphorothioate; note = sugar modification: 2'-O-methoxyethylribose
  modified_base 14: mod_base = m5c; mod_base = OTHER; note = backbone modification: 5'-phosphorothioate; note = sugar modification: 2'-O-methoxyethylribose
  modified_base 15: mod_base = OTHER; note = thymine; note = sugar modification: 2'-O-methoxyethylribose; note = backbone modification: 5'-phosphorothioate
  modified_base 16: mod_base = m5c; mod_base = OTHER; note = backbone modification: 5'-phosphorothioate; note = sugar modification: 2'-O-methoxyethylribose
  modified_base 17: mod_base = OTHER; mod_base = m5c; note = sugar modification: 2'-O-methoxyethylribose; note = backbone modification: 5'-phosphorothioate
  modified_base 18: mod_base = OTHER; note = thymine; note = sugar modification: 2'-O-methoxyethylribose
ctgtatagggaccctcct

SEQ ID NO: 375 - RNA, 18 nt, synthetic construct
  source 1..18: mol_type = other RNA; note = Antisense oligonucleotide
  modified_base 1: mod_base = OTHER; note = sugar modification: 2'-O-methoxyethylribose; note = backbone modification: 5'-phosphorothioate
  modified_base 2: mod_base = OTHER; note = backbone modification: 5'-phosphorothioate; note = thymine; note = sugar modification: 2'-O-methoxyethylribose
  modified_base 3: mod_base = OTHER; mod_base = m5c; note = backbone modification: 5'-phosphorothioate; note = sugar modification: 2'-O-methoxyethylribose
  modified_base 4: mod_base = OTHER; note = backbone modification: 5'-phosphorothioate; note = thymine; note = sugar modification: 2'-O-methoxyethylribose
  modified_base 5: mod_base = OTHER; note = backbone modification: 5'-phosphorothioate; note = sugar modification: 2'-O-methoxyethylribose
  modified_base 6: mod_base = OTHER; mod_base = m5c; note = backbone modification: 5'-phosphorothioate; note = sugar modification: 2'-O-methoxyethylribose
  modified_base 7: mod_base = OTHER; note = sugar modification: 2'-O-methoxyethylribose; note = thymine; note = backbone modification: 5'-phosphorothioate
  modified_base 8: mod_base = OTHER; note = backbone modification: 5'-phosphorothioate; note = sugar modification: 2'-O-methoxyethylribose
  modified_base 9: mod_base = OTHER; note = backbone modification: 5'-phosphorothioate; note = sugar modification: 2'-O-methoxyethylribose; note = thymine
  modified_base 10: mod_base = OTHER; note = backbone modification: 5'-phosphorothioate; note = sugar modification: 2'-O-methoxyethylribose
  modified_base 11: mod_base = OTHER; note = thymine; note = backbone modification: 5'-phosphorothioate; note = sugar modification: 2'-O-methoxyethylribose
  modified_base 12: mod_base = OTHER; note = sugar modification: 2'-O-methoxyethylribose; note = backbone modification: 5'-phosphorothioate
  modified_base 13: mod_base = OTHER; note = sugar modification: 2'-O-methoxyethylribose; note = backbone modification: 5'-phosphorothioate
  modified_base 14: mod_base = OTHER; note = sugar modification: 2'-O-methoxyethylribose; note = backbone modification: 5'-phosphorothioate
  modified_base 15: mod_base = OTHER; note = sugar modification: 2'-O-methoxyethylribose; note = backbone modification: 5'-phosphorothioate
  modified_base 16: mod_base = OTHER; note = sugar modification: 2'-O-methoxyethylribose; note = backbone modification: 5'-phosphorothioate
  modified_base 17: mod_base = OTHER; mod_base = m5c; note = backbone modification: 5'-phosphorothioate; note = sugar modification: 2'-O-methoxyethylribose
  modified_base 18: mod_base = m5c; mod_base = OTHER; note = sugar modification: 2'-O-methoxyethylribose
atctactgtatagggacc

SEQ ID NO: 376 - RNA, 18 nt, synthetic construct
  source 1..18: mol_type = other RNA; note = Antisense oligonucleotide
  modified_base 1: mod_base = OTHER; note = backbone modification: 5'-phosphorothioate; note = sugar modification: 2'-O-methoxyethylribose
  modified_base 2: mod_base = OTHER; note = sugar modification: 2'-O-methoxyethylribose; note = thymine; note = backbone modification: 5'-phosphorothioate
  modified_base 3: mod_base = OTHER; note = thymine; note = sugar modification: 2'-O-methoxyethylribose; note = backbone modification: 5'-phosphorothioate
  modified_base 4: mod_base = OTHER; note = sugar modification: 2'-O-methoxyethylribose; note = backbone modification: 5'-phosphorothioate
  modified_base 5: mod_base = OTHER; mod_base = m5c; note = backbone modification: 5'-phosphorothioate; note = sugar modification: 2'-O-methoxyethylribose
  modified_base 6: mod_base = OTHER; note = sugar modification: 2'-O-methoxyethylribose; note = backbone modification: 5'-phosphorothioate
  modified_base 7: mod_base = OTHER; note = sugar modification: 2'-O-methoxyethylribose; note = thymine; note = backbone modification: 5'-phosphorothioate
  modified_base 8: mod_base = m5c; mod_base = OTHER; note = sugar modification: 2'-O-methoxyethylribose; note = backbone modification: 5'-phosphorothioate
  modified_base 9: mod_base = OTHER; note = backbone modification: 5'-phosphorothioate; note = thymine; note = sugar modification: 2'-O-methoxyethylribose
  modified_base 10: mod_base = OTHER; note = backbone modification: 5'-phosphorothioate; note = sugar modification: 2'-O-methoxyethylribose
  modified_base 11: mod_base = OTHER; mod_base = m5c; note = sugar modification: 2'-O-methoxyethylribose; note = backbone modification: 5'-phosphorothioate
  modified_base 12: mod_base = OTHER; note = backbone modification: 5'-phosphorothioate; note = thymine; note = sugar modification: 2'-O-methoxyethylribose
  modified_base 13: mod_base = OTHER; note = backbone modification: 5'-phosphorothioate; note = sugar modification: 2'-O-methoxyethylribose
  modified_base 14: mod_base = OTHER; note = backbone modification: 5'-phosphorothioate; note = sugar modification: 2'-O-methoxyethylribose; note = thymine
  modified_base 15: mod_base = OTHER; note = backbone modification: 5'-phosphorothioate; note = sugar modification: 2'-O-methoxyethylribose
  modified_base 16: mod_base = OTHER; note = thymine; note = backbone modification: 5'-phosphorothioate; note = sugar modification: 2'-O-methoxyethylribose
  modified_base 17: mod_base = OTHER; note = backbone modification: 5'-phosphorothioate; note = sugar modification: 2'-O-methoxyethylribose
  modified_base 18: mod_base = OTHER; note = sugar modification: 2'-O-methoxyethylribose
attgcatctactgtatag

SEQ ID NO: 377 - RNA, 18 nt, synthetic construct
  source 1..18: mol_type = other RNA; note = Antisense oligonucleotide
  modified_base 1: mod_base = OTHER; note = thymine; note = backbone modification: 5'-phosphorothioate; note = sugar modification: 2'-O-methoxyethylribose
  modified_base 2: mod_base = OTHER; note = backbone modification: 5'-phosphorothioate; note = thymine; note = sugar modification: 2'-O-methoxyethylribose
  modified_base 3: mod_base = OTHER; note = backbone modification: 5'-phosphorothioate; note = thymine; note = sugar modification: 2'-O-methoxyethylribose
  modified_base 4: mod_base = OTHER; note = backbone modification: 5'-phosphorothioate; note = sugar modification: 2'-O-methoxyethylribose
  modified_base 5: mod_base = OTHER; note = backbone modification: 5'-phosphorothioate; note = sugar modification: 2'-O-methoxyethylribose
  modified_base 6: mod_base = OTHER; note = sugar modification: 2'-O-methoxyethylribose; note = backbone modification: 5'-phosphorothioate
  modified_base 7: mod_base = OTHER; note = backbone modification: 5'-phosphorothioate; note = sugar modification: 2'-O-methoxyethylribose; note = thymine
  modified_base 8: mod_base = OTHER; note = sugar modification: 2'-O-methoxyethylribose; note = thymine; note = backbone modification: 5'-phosphorothioate
  modified_base 9: mod_base = OTHER; note = backbone modification: 5'-phosphorothioate; note = sugar modification: 2'-O-methoxyethylribose
  modified_base 10: mod_base = m5c; mod_base = OTHER; note = sugar modification: 2'-O-methoxyethylribose; note = backbone modification: 5'-phosphorothioate
  modified_base 11: mod_base = OTHER; note = backbone modification: 5'-phosphorothioate; note = sugar modification: 2'-O-methoxyethylribose
  modified_base 12: mod_base = OTHER; note = backbone modification: 5'-phosphorothioate; note = sugar modification: 2'-O-methoxyethylribose; note = thymine
  modified_base 13: mod_base = m5c; mod_base = OTHER; note = backbone modification: 5'-phosphorothioate; note = sugar modification: 2'-O-methoxyethylribose
  modified_base 14: mod_base = OTHER; note = backbone modification: 5'-phosphorothioate; note = sugar modification: 2'-O-methoxyethylribose; note = thymine
  modified_base 15: mod_base = OTHER; note = backbone modification: 5'-phosphorothioate; note = sugar modification: 2'-O-methoxyethylribose
  modified_base 16: mod_base = OTHER; mod_base = m5c; note = sugar modification: 2'-O-methoxyethylribose; note = backbone modification: 5'-phosphorothioate
  modified_base 17: mod_base = OTHER; note = sugar modification: 2'-O-methoxyethylribose; note = thymine; note = backbone modification: 5'-phosphorothioate
  modified_base 18: mod_base = OTHER; note = sugar modification: 2'-O-methoxyethylribose
tttggattgcatctactg

SEQ ID NO: 378 - RNA, 18 nt, synthetic construct
  source 1..18: mol_type = other RNA; note = Antisense oligonucleotide
  modified_base 1: mod_base = OTHER; note = backbone modification: 5'-phosphorothioate; note = thymine; note = sugar modification: 2'-O-methoxyethylribose
  modified_base 2: mod_base = OTHER; note = thymine; note = sugar modification: 2'-O-methoxyethylribose; note = backbone modification: 5'-phosphorothioate
  modified_base 3: mod_base = OTHER; note = thymine; note = sugar modification: 2'-O-methoxyethylribose; note = backbone modification: 5'-phosphorothioate
  modified_base 4: mod_base = OTHER; mod_base = m5c; note = sugar modification: 2'-O-methoxyethylribose; note = backbone modification: 5'-phosphorothioate
  modified_base 5: mod_base = OTHER; note = backbone modification: 5'-phosphorothioate; note = thymine; note = sugar modification: 2'-O-methoxyethylribose
  modified_base 6: mod_base = OTHER; note = sugar modification: 2'-O-methoxyethylribose; note = backbone modification: 5'-phosphorothioate; note = thymine
  modified_base 7: mod_base = OTHER; note = sugar modification: 2'-O-methoxyethylribose; note = backbone modification: 5'-phosphorothioate; note = thymine
  modified_base 8: mod_base = OTHER; note = thymine; note = sugar modification: 2'-O-methoxyethylribose; note = backbone modification: 5'-phosphorothioate
  modified_base 9: mod_base = OTHER; note = sugar modification: 2'-O-methoxyethylribose; note = backbone modification: 5'-phosphorothioate
  modified_base 10: mod_base = OTHER; note = backbone modification: 5'-phosphorothioate; note = sugar modification: 2'-O-methoxyethylribose
  modified_base 11: mod_base = OTHER; note = sugar modification: 2'-O-methoxyethylribose; note = backbone modification: 5'-phosphorothioate
  modified_base 12: mod_base = OTHER; note = thymine; note = sugar modification: 2'-O-methoxyethylribose; note = backbone modification: 5'-phosphorothioate
  modified_base 13: mod_base = OTHER; note = backbone modification: 5'-phosphorothioate; note = sugar modification: 2'-O-methoxyethylribose; note = thymine
  modified_base 14: mod_base = OTHER; note = backbone modification: 5'-phosphorothioate; note = sugar modification: 2'-O-methoxyethylribose
  modified_base 15: mod_base = OTHER; mod_base = m5c; note = sugar modification: 2'-O-methoxyethylribose; note = backbone modification: 5'-phosphorothioate
  modified_base 16: mod_base = OTHER; note = backbone modification: 5'-phosphorothioate; note = sugar modification: 2'-O-methoxyethylribose
  modified_base 17: mod_base = OTHER; note = thymine; note = backbone modification: 5'-phosphorothioate; note = sugar modification: 2'-O-methoxyethylribose
  modified_base 18: mod_base = OTHER; mod_base = m5c; note = sugar modification: 2'-O-methoxyethylribose
tttcttttggattgcatc

SEQ ID NO: 379 - RNA, 18 nt, synthetic construct
  source 1..18: mol_type = other RNA; note = Antisense oligonucleotide
  modified_base 1: mod_base = OTHER; note = backbone modification: 5'-phosphorothioate; note = sugar modification: 2'-O-methoxyethylribose
  modified_base 2: mod_base = OTHER; note = sugar modification: 2'-O-methoxyethylribose; note = thymine; note = backbone modification: 5'-phosphorothioate
  modified_base 3: mod_base = OTHER; note = backbone modification: 5'-phosphorothioate; note = sugar modification: 2'-O-methoxyethylribose
  modified_base 4: mod_base = OTHER; note = sugar modification: 2'-O-methoxyethylribose; note = backbone modification: 5'-phosphorothioate
  modified_base 5: mod_base = OTHER; note = thymine; note = sugar modification: 2'-O-methoxyethylribose; note = backbone modification: 5'-phosphorothioate
  modified_base 6: mod_base = OTHER; note = sugar modification: 2'-O-methoxyethylribose; note = backbone modification: 5'-phosphorothioate; note = thymine
  modified_base 7: mod_base = OTHER; note = backbone modification: 5'-phosphorothioate; note = thymine; note = sugar modification: 2'-O-methoxyethylribose
  modified_base 8: mod_base = OTHER; note = backbone modification: 5'-phosphorothioate; note = thymine; note = sugar modification: 2'-O-methoxyethylribose
  modified_base 9: mod_base = OTHER; mod_base = m5c; note = sugar modification: 2'-O-methoxyethylribose; note = backbone modification: 5'-phosphorothioate
  modified_base 10: mod_base = OTHER; note = sugar modification: 2'-O-methoxyethylribose; note = thymine; note = backbone modification: 5'-phosphorothioate
  modified_base 11: mod_base = OTHER; note = sugar modification: 2'-O-methoxyethylribose; note = thymine; note = backbone modification: 5'-phosphorothioate
  modified_base 12: mod_base = OTHER; note = backbone modification: 5'-phosphorothioate; note = thymine; note = sugar modification: 2'-O-methoxyethylribose
  modified_base 13: mod_base = OTHER; note = thymine; note = backbone modification: 5'-phosphorothioate; note = sugar modification: 2'-O-methoxyethylribose
  modified_base 14: mod_base = OTHER; note = sugar modification: 2'-O-methoxyethylribose; note = backbone modification: 5'-phosphorothioate
  modified_base 15: mod_base = OTHER; note = sugar modification: 2'-O-methoxyethylribose; note = backbone modification: 5'-phosphorothioate
  modified_base 16: mod_base = OTHER; note = backbone modification: 5'-phosphorothioate; note = sugar modification: 2'-O-methoxyethylribose
  modified_base 17: mod_base = OTHER; note = sugar modification: 2'-O-methoxyethylribose; note = thymine; note = backbone modification: 5'-phosphorothioate
  modified_base 18: mod_base = OTHER; note = thymine; note = sugar modification: 2'-O-methoxyethylribose
gtgattttcttttggatt

SEQ ID NO: 380 - RNA, 18 nt, synthetic construct
  source 1..18: mol_type = other RNA; note = Antisense oligonucleotide
  modified_base 1: mod_base = OTHER; note = thymine; note = sugar modification: 2'-O-methoxyethylribose; note = backbone modification: 5'-phosphorothioate
  modified_base 2: mod_base = OTHER; note = backbone modification: 5'-phosphorothioate; note = thymine; note = sugar modification: 2'-O-methoxyethylribose
  modified_base 3: mod_base = OTHER; note = thymine; note = sugar modification: 2'-O-methoxyethylribose; note = backbone modification: 5'-phosphorothioate
  modified_base 4: mod_base = m5c; mod_base = OTHER; note = sugar modification: 2'-O-methoxyethylribose; note = backbone modification: 5'-phosphorothioate
  modified_base 5: mod_base = OTHER; note = backbone modification: 5'-phosphorothioate; note = thymine; note = sugar modification: 2'-O-methoxyethylribose
  modified_base 6: mod_base = OTHER; note = backbone modification: 5'-phosphorothioate; note = sugar modification: 2'-O-methoxyethylribose
  modified_base 7: mod_base = OTHER; note = sugar modification: 2'-O-methoxyethylribose; note = backbone modification: 5'-phosphorothioate; note = thymine
  modified_base 8: mod_base = OTHER; note = sugar modification: 2'-O-methoxyethylribose; note = backbone modification: 5'-phosphorothioate
  modified_base 9: mod_base = OTHER; note = sugar modification: 2'-O-methoxyethylribose; note = backbone modification: 5'-phosphorothioate
  modified_base 10: mod_base = OTHER; note = thymine; note = sugar modification: 2'-O-methoxyethylribose; note = backbone modification: 5'-phosphorothioate
  modified_base 11: mod_base = OTHER; note = sugar modification: 2'-O-methoxyethylribose; note = backbone modification: 5'-phosphorothioate; note = thymine
  modified_base 12: mod_base = OTHER; note = thymine; note = sugar modification: 2'-O-methoxyethylribose; note = backbone modification: 5'-phosphorothioate
  modified_base 13: mod_base = OTHER; note = sugar modification: 2'-O-methoxyethylribose; note = backbone modification: 5'-phosphorothioate; note = thymine
  modified_base 14: mod_base = OTHER; mod_base = m5c; note = backbone modification: 5'-phosphorothioate; note = sugar modification: 2'-O-methoxyethylribose
  modified_base 15: mod_base = OTHER; note = sugar modification: 2'-O-methoxyethylribose; note = backbone modification: 5'-phosphorothioate; note = thymine
  modified_base 16: mod_base = OTHER; note = sugar modification: 2'-O-methoxyethylribose; note = backbone modification: 5'-phosphorothioate; note = thymine
  modified_base 17: mod_base = OTHER; note = backbone modification: 5'-phosphorothioate; note = sugar modification: 2'-O-methoxyethylribose; note = thymine
  modified_base 18: mod_base = OTHER; note = thymine; note = sugar modification: 2'-O-methoxyethylribose
tttctgtgattttctttt

SEQ ID NO: 381 - RNA, 18 nt, synthetic construct
  source 1..18: mol_type = other RNA; note = Antisense oligonucleotide
  modified_base 1: mod_base = OTHER; mod_base = m5c; note = backbone modification: 5'-phosphorothioate; note = sugar modification: 2'-O-methoxyethylribose
  modified_base 2: mod_base = OTHER; note = sugar modification: 2'-O-methoxyethylribose; note = thymine; note = backbone modification: 5'-phosphorothioate
  modified_base 3: mod_base = OTHER; note = thymine; note = sugar modification: 2'-O-methoxyethylribose; note = backbone modification: 5'-phosphorothioate
  modified_base 4: mod_base = OTHER; note = sugar modification: 2'-O-methoxyethylribose; note = backbone modification: 5'-phosphorothioate
  modified_base 5: mod_base = OTHER; note = sugar modification: 2'-O-methoxyethylribose; note = backbone modification: 5'-phosphorothioate
  modified_base 6: mod_base = OTHER; note = sugar modification: 2'-O-methoxyethylribose; note = thymine; note = backbone modification: 5'-phosphorothioate
  modified_base 7: mod_base = OTHER; note = sugar modification: 2'-O-methoxyethylribose; note = thymine; note = backbone modification: 5'-phosphorothioate
  modified_base 8: mod_base = OTHER; note = sugar modification: 2'-O-methoxyethylribose; note = thymine; note = backbone modification: 5'-phosphorothioate
  modified_base 9: mod_base = OTHER; mod_base = m5c; note = sugar modification: 2'-O-methoxyethylribose; note = backbone modification: 5'-phosphorothioate
  modified_base 10: mod_base = OTHER; note = backbone modification: 5'-phosphorothioate; note = sugar modification: 2'-O-methoxyethylribose; note = thymine
  modified_base 11: mod_base = OTHER; note = backbone modification: 5'-phosphorothioate; note = sugar modification: 2'-O-methoxyethylribose
  modified_base 12: mod_base = OTHER; note = sugar modification: 2'-O-methoxyethylribose; note = backbone modification: 5'-phosphorothioate; note = thymine
  modified_base 13: mod_base = OTHER; note = sugar modification: 2'-O-methoxyethylribose; note = backbone modification: 5'-phosphorothioate
  modified_base 14: mod_base = OTHER; note = backbone modification: 5'-phosphorothioate; note = sugar modification: 2'-O-methoxyethylribose
  modified_base 15: mod_base = OTHER; note = backbone modification: 5'-phosphorothioate; note = thymine; note = sugar modification: 2'-O-methoxyethylribose
  modified_base 16: mod_base = OTHER; note = thymine; note = sugar modification: 2'-O-methoxyethylribose; note = backbone modification: 5'-phosphorothioate
  modified_base 17: mod_base = OTHER; note = sugar modification: 2'-O-methoxyethylribose; note = thymine; note = backbone modification: 5'-phosphorothioate
  modified_base 18: mod_base = OTHER; note = sugar modification: 2'-O-methoxyethylribose; note = thymine
cttggtttctgtgatttt

SEQ ID NO: 382 - RNA, 18 nt, synthetic construct
  source 1..18: mol_type = other RNA; note = Antisense oligonucleotide
  modified_base 1: mod_base = m5c; mod_base = OTHER; note = sugar modification: 2'-O-methoxyethylribose; note = backbone modification: 5'-phosphorothioate
  modified_base 2: mod_base = OTHER; note = backbone modification: 5'-phosphorothioate; note = thymine; note = sugar modification: 2'-O-methoxyethylribose
  modified_base 3: mod_base = OTHER; note = sugar modification: 2'-O-methoxyethylribose; note = backbone modification: 5'-phosphorothioate
  modified_base 4: mod_base = OTHER; note = backbone modification: 5'-phosphorothioate; note = sugar modification: 2'-O-methoxyethylribose
  modified_base 5: mod_base = OTHER; mod_base = m5c; note = backbone modification: 5'-phosphorothioate; note = sugar modification: 2'-O-methoxyethylribose
  modified_base 6: mod_base = m5c; mod_base = OTHER; note = sugar modification: 2'-O-methoxyethylribose; note = backbone modification: 5'-phosphorothioate
  modified_base 7: mod_base = OTHER; note = thymine; note = sugar modification: 2'-O-methoxyethylribose; note = backbone modification: 5'-phosphorothioate
  modified_base 8: mod_base = OTHER; note = thymine; note = sugar modification: 2'-O-methoxyethylribose; note = backbone modification: 5'-phosphorothioate
  modified_base 9: mod_base = OTHER; note = sugar modification: 2'-O-methoxyethylribose; note = backbone modification: 5'-phosphorothioate
  modified_base 10: mod_base = OTHER; note = sugar modification: 2'-O-methoxyethylribose; note = backbone modification: 5'-phosphorothioate
  modified_base 11: mod_base = OTHER; note = backbone modification: 5'-phosphorothioate; note = thymine; note = sugar modification: 2'-O-methoxyethylribose
  modified_base 12: mod_base = OTHER; note = thymine; note = sugar modification: 2'-O-methoxyethylribose; note = backbone modification: 5'-phosphorothioate
  modified_base 13: mod_base = OTHER; note = backbone modification: 5'-phosphorothioate; note = sugar modification: 2'-O-methoxyethylribose; note = thymine
  modified_base 14: mod_base = OTHER; mod_base = m5c; note = sugar modification: 2'-O-methoxyethylribose; note = backbone modification: 5'-phosphorothioate
  modified_base 15: mod_base = OTHER; note = thymine; note = backbone modification: 5'-phosphorothioate; note = sugar modification: 2'-O-methoxyethylribose
  modified_base 16: mod_base = OTHER; note = sugar modification: 2'-O-methoxyethylribose; note = backbone modification: 5'-phosphorothioate
  modified_base 17: mod_base = OTHER; note = sugar modification: 2'-O-methoxyethylribose; note = backbone modification: 5'-phosphorothioate; note = thymine
  modified_base 18: mod_base = OTHER; note = sugar modification: 2'-O-methoxyethylribose
ctaaccttggtttctgtg

SEQ ID NO: 383 - RNA, 18 nt, synthetic construct
  source 1..18: mol_type = other RNA; note = Antisense oligonucleotide
  modified_base 1: mod_base = OTHER; note = thymine; note = sugar modification: 2'-O-methoxyethylribose; note = backbone modification: 5'-phosphorothioate
  modified_base 2: mod_base = OTHER; note = sugar modification: 2'-O-methoxyethylribose; note = backbone modification: 5'-phosphorothioate
  modified_base 3: mod_base = OTHER; note = backbone modification: 5'-phosphorothioate; note = sugar modification: 2'-O-methoxyethylribose
  modified_base 4: mod_base = OTHER; note = thymine; note = sugar modification: 2'-O-methoxyethylribose; note = backbone modification: 5'-phosphorothioate
  modified_base 5: mod_base = OTHER; note = backbone modification: 5'-phosphorothioate; note = sugar modification: 2'-O-methoxyethylribose
  modified_base 6: mod_base = m5c; mod_base = OTHER; note = backbone modification: 5'-phosphorothioate; note = sugar modification: 2'-O-methoxyethylribose
  modified_base 7: mod_base = OTHER; note = backbone modification: 5'-phosphorothioate; note = thymine; note = sugar modification: 2'-O-methoxyethylribose
  modified_base 8: mod_base = OTHER; note = sugar modification: 2'-O-methoxyethylribose; note = backbone modification: 5'-phosphorothioate
  modified_base 9: mod_base = OTHER; note = sugar modification: 2'-O-methoxyethylribose; note = backbone modification: 5'-phosphorothioate
  modified_base 10: mod_base = m5c; mod_base = OTHER; note = backbone modification: 5'-phosphorothioate; note = sugar modification: 2'-O-methoxyethylribose
  modified_base 11: mod_base = m5c; mod_base = OTHER; note = backbone modification: 5'-phosphorothioate; note = sugar modification: 2'-O-methoxyethylribose
  modified_base 12: mod_base = OTHER; note = backbone modification: 5'-phosphorothioate; note = thymine; note = sugar modification: 2'-O-methoxyethylribose
  modified_base 13: mod_base = OTHER; note = backbone modification: 5'-phosphorothioate; note = sugar modification: 2'-O-methoxyethylribose; note = thymine
  modified_base 14: mod_base = OTHER; note = sugar modification: 2'-O-methoxyethylribose; note = backbone modification: 5'-phosphorothioate
  modified_base 15: mod_base = OTHER; note = backbone modification: 5'-phosphorothioate; note = sugar modification: 2'-O-methoxyethylribose
  modified_base 16: mod_base = OTHER; note = thymine; note = sugar modification: 2'-O-methoxyethylribose; note = backbone modification: 5'-phosphorothioate
  modified_base 17: mod_base = OTHER; note = thymine; note = sugar modification: 2'-O-methoxyethylribose; note = backbone modification: 5'-phosphorothioate
  modified_base 18: mod_base = OTHER; note = sugar modification: 2'-O-methoxyethylribose; note = thymine
tgatactaaccttggttt

SEQ ID NO: 384 - RNA, 18 nt, synthetic construct
  source 1..18: mol_type = other RNA; note = Antisense oligonucleotide
  modified_base 1: mod_base = OTHER; note = sugar modification: 2'-O-methoxyethylribose; note = backbone modification: 5'-phosphorothioate
  modified_base 2: mod_base = OTHER; note = sugar modification: 2'-O-methoxyethylribose; note = thymine; note = backbone modification: 5'-phosphorothioate
  modified_base 3: mod_base = m5c; mod_base = OTHER; note = sugar modification: 2'-O-methoxyethylribose; note = backbone modification: 5'-phosphorothioate
  modified_base 4: mod_base = OTHER; note = thymine; note = sugar modification: 2'-O-methoxyethylribose; note = backbone modification: 5'-phosphorothioate
  modified_base 5: mod_base = OTHER; note = sugar modification: 2'-O-methoxyethylribose; note = thymine; note = backbone modification: 5'-phosphorothioate
  modified_base 6: mod_base = OTHER; note = sugar modification: 2'-O-methoxyethylribose; note = thymine; note = backbone modification: 5'-phosphorothioate
  modified_base 7: mod_base = OTHER; note = sugar modification: 2'-O-methoxyethylribose; note = backbone modification: 5'-phosphorothioate
  modified_base 8: mod_base = OTHER; note = backbone modification: 5'-phosphorothioate; note = sugar modification: 2'-O-methoxyethylribose
  modified_base 9: mod_base = OTHER; note = backbone modification: 5'-phosphorothioate; note = sugar modification: 2'-O-methoxyethylribose; note = thymine
  modified_base 10: mod_base = OTHER; note = sugar modification: 2'-O-methoxyethylribose; note = backbone modification: 5'-phosphorothioate
  modified_base 11: mod_base = OTHER; mod_base = m5c; note = backbone modification: 5'-phosphorothioate; note = sugar modification: 2'-O-methoxyethylribose
  modified_base 12: mod_base = OTHER; note = backbone modification: 5'-phosphorothioate; note = sugar modification: 2'-O-methoxyethylribose; note = thymine
  modified_base 13: mod_base = OTHER; note = backbone modification: 5'-phosphorothioate; note = sugar modification: 2'-O-methoxyethylribose
  modified_base 14: mod_base = OTHER; note = backbone modification: 5'-phosphorothioate; note = sugar modification: 2'-O-methoxyethylribose
  modified_base 15: mod_base = m5c; mod_base = OTHER; note = sugar modification: 2'-O-methoxyethylribose; note = backbone modification: 5'-phosphorothioate
  modified_base 16: mod_base = m5c; mod_base = OTHER; note = sugar modification: 2'-O-methoxyethylribose; note = backbone modification: 5'-phosphorothioate
  modified_base 17: mod_base = OTHER; note = backbone modification: 5'-phosphorothioate; note = sugar modification: 2'-O-methoxyethylribose; note = thymine
  modified_base 18: mod_base = OTHER; note = sugar modification: 2'-O-methoxyethylribose; note = thymine
atctttgatactaacctt

SEQ ID NO: 385 - RNA, 18 nt, synthetic construct
  source 1..18: mol_type = other RNA; note = Antisense oligonucleotide
  modified_base 1: mod_base = OTHER; note = sugar modification: 2'-O-methoxyethylribose; note = backbone modification: 5'-phosphorothioate
  modified_base 2: mod_base = OTHER; note = backbone modification: 5'-phosphorothioate; note = sugar modification: 2'-O-methoxyethylribose
  modified_base 3: mod_base = OTHER; note = sugar modification: 2'-O-methoxyethylribose; note = backbone modification: 5'-phosphorothioate
  modified_base 4: mod_base = OTHER; note = sugar modification: 2'-O-methoxyethylribose; note = backbone modification: 5'-phosphorothioate
  modified_base 5: mod_base = OTHER; note = backbone modification: 5'-phosphorothioate; note = thymine; note = sugar modification: 2'-O-methoxyethylribose
  modified_base 6: mod_base = OTHER; note = sugar modification: 2'-O-methoxyethylribose; note = backbone modification: 5'-phosphorothioate
  modified_base 7: mod_base = OTHER; note = backbone modification: 5'-phosphorothioate; note = sugar modification: 2'-O-methoxyethylribose; note = thymine
  modified_base 8: mod_base = OTHER; mod_base = m5c; note = sugar modification: 2'-O-methoxyethylribose; note = backbone modification: 5'-phosphorothioate
  modified_base 9: mod_base = OTHER; note = sugar modification: 2'-O-methoxyethylribose; note = backbone modification: 5'-phosphorothioate; note = thymine
  modified_base 10: mod_base = OTHER; note = backbone modification: 5'-phosphorothioate; note = sugar modification: 2'-O-methoxyethylribose; note = thymine
  modified_base 11: mod_base = OTHER; note = sugar modification: 2'-O-methoxyethylribose; note = thymine; note = backbone modification: 5'-phosphorothioate
  modified_base 12: mod_base = OTHER; note = backbone modification: 5'-phosphorothioate; note = sugar modification: 2'-O-methoxyethylribose
  modified_base 13: mod_base = OTHER; note = backbone modification: 5'-phosphorothioate; note = sugar modification: 2'-O-methoxyethylribose
  modified_base 14: mod_base = OTHER; note = thymine; note = backbone modification: 5'-phosphorothioate; note = sugar modification: 2'-O-methoxyethylribose
  modified_base 15: mod_base = OTHER; note = sugar modification: 2'-O-methoxyethylribose; note = backbone modification: 5'-phosphorothioate
  modified_base 16: mod_base = m5c; mod_base = OTHER; note = sugar modification: 2'-O-methoxyethylribose; note = backbone modification: 5'-phosphorothioate
  modified_base 17: mod_base = OTHER; note = backbone modification: 5'-phosphorothioate; note = thymine; note = sugar modification: 2'-O-methoxyethylribose
  modified_base 18: mod_base = OTHER; note = sugar modification: 2'-O-methoxyethylribose
aaggtatctttgatacta

SEQ ID NO: 386 - RNA, 18 nt, synthetic construct
  source 1..18: mol_type = other RNA; note = Antisense oligonucleotide
  modified_base 1: mod_base = OTHER; note = sugar modification: 2'-O-methoxyethylribose; note = backbone modification: 5'-phosphorothioate; note = thymine
  modified_base 2: mod_base = OTHER; note = thymine; note = backbone modification: 5'-phosphorothioate; note = sugar modification: 2'-O-methoxyethylribose
  modified_base 3: mod_base = OTHER; note = sugar modification: 2'-O-methoxyethylribose; note = backbone modification: 5'-phosphorothioate
  modified_base 4: mod_base = OTHER; note = sugar modification: 2'-O-methoxyethylribose; note = backbone modification: 5'-phosphorothioate
  modified_base 5: mod_base = OTHER; note = backbone modification: 5'-phosphorothioate; note = sugar modification: 2'-O-methoxyethylribose
  modified_base 6: mod_base = OTHER; note = sugar modification: 2'-O-methoxyethylribose; note = backbone modification: 5'-phosphorothioate
  modified_base 7: mod_base = OTHER; note = sugar modification: 2'-O-methoxyethylribose; note = backbone modification: 5'-phosphorothioate
  modified_base 8: mod_base = OTHER; note = backbone modification: 5'-phosphorothioate; note = sugar modification: 2'-O-methoxyethylribose
  modified_base 9: mod_base = OTHER; note = sugar modification: 2'-O-methoxyethylribose; note = backbone modification: 5'-phosphorothioate
  modified_base 10: mod_base = OTHER; note = backbone modification: 5'-phosphorothioate; note = sugar modification: 2'-O-methoxyethylribose; note = thymine
  modified_base 11: mod_base = OTHER; note = backbone modification: 5'-phosphorothioate; note = sugar modification: 2'-O-methoxyethylribose
  modified_base 12: mod_base = OTHER; note = thymine; note = sugar modification: 2'-O-methoxyethylribose; note = backbone modification: 5'-phosphorothioate
  modified_base 13: mod_base = m5c; mod_base = OTHER; note = backbone modification: 5'-phosphorothioate; note = sugar modification: 2'-O-methoxyethylribose
  modified_base 14: mod_base = OTHER; note = thymine; note = sugar modification: 2'-O-methoxyethylribose; note = backbone modification: 5'-phosphorothioate
  modified_base 15: mod_base = OTHER; note = sugar modification: 2'-O-methoxyethylribose; note = thymine; note = backbone modification: 5'-phosphorothioate
  modified_base 16: mod_base = OTHER; note = sugar modification: 2'-O-methoxyethylribose; note = thymine; note = backbone modification: 5'-phosphorothioate
  modified_base 17: mod_base = OTHER; note = sugar modification: 2'-O-methoxyethylribose; note = backbone modification: 5'-phosphorothioate
  modified_base 18: mod_base = OTHER; note = sugar modification: 2'-O-methoxyethylribose
ttaaaaaggtatctttga

SEQ ID NO: 387 - RNA, 18 nt, synthetic construct
  source 1..18: mol_type = other RNA; note = Antisense oligonucleotide
  modified_base 1: mod_base = OTHER; note = backbone modification: 5'-phosphorothioate; note = thymine; note = sugar modification: 2'-O-methoxyethylribose
  modified_base 2: mod_base = OTHER; note = thymine; note = sugar modification: 2'-O-methoxyethylribose; note = backbone modification: 5'-phosphorothioate
  modified_base 3: mod_base = OTHER; note = backbone modification: 5'-phosphorothioate; note = sugar modification: 2'-O-methoxyethylribose
  modified_base 4: mod_base = OTHER; note = sugar modification: 2'-O-methoxyethylribose; note = backbone modification: 5'-phosphorothioate; note = thymine
  modified_base 5: mod_base = OTHER; note = backbone modification: 5'-phosphorothioate; note = thymine; note = sugar modification: 2'-O-methoxyethylribose
  modified_base 6: mod_base = OTHER; note = backbone modification: 5'-phosphorothioate; note = sugar modification: 2'-O-methoxyethylribose; note = thymine
  modified_base 7: mod_base = OTHER; note = sugar modification: 2'-O-methoxyethylribose; note = thymine; note = backbone modification: 5'-phosphorothioate
  modified_base 8: mod_base = OTHER; note = sugar modification: 2'-O-methoxyethylribose; note = backbone modification: 5'-phosphorothioate
  modified_base 9: mod_base = OTHER; note = sugar modification: 2'-O-methoxyethylribose; note = backbone modification: 5'-phosphorothioate
  modified_base 10: mod_base = OTHER; note = sugar modification: 2'-O-methoxyethylribose; note = backbone modification: 5'-phosphorothioate
  modified_base 11: mod_base = OTHER; note = sugar modification: 2'-O-methoxyethylribose; note = backbone modification: 5'-phosphorothioate
  modified_base 12: mod_base = OTHER; note = sugar modification: 2'-O-methoxyethylribose; note = backbone modification: 5'-phosphorothioate
  modified_base 13: mod_base = OTHER; note = sugar modification: 2'-O-methoxyethylribose; note = backbone modification: 5'-phosphorothioate
  modified_base 14: mod_base = OTHER; note = sugar modification: 2'-O-methoxyethylribose; note = backbone modification: 5'-phosphorothioate
  modified_base 15: mod_base = OTHER; note = backbone modification: 5'-phosphorothioate; note = thymine; note = sugar modification: 2'-O-methoxyethylribose
  modified_base 16: mod_base = OTHER; note = backbone modification: 5'-phosphorothioate; note = sugar modification: 2'-O-methoxyethylribose
  modified_base 17: mod_base = OTHER; note = backbone modification: 5'-phosphorothioate; note = sugar modification: 2'-O-methoxyethylribose; note = thymine
  modified_base 18: mod_base = m5c; mod_base = OTHER; note = sugar modification: 2'-O-methoxyethylribose
ttattttaaaaaggtatc

SEQ ID NO: 388 - RNA, 18 nt, synthetic construct
  source 1..18: mol_type = other RNA; note = Antisense oligonucleotide
  modified_base 1: mod_base = OTHER; note = backbone modification: 5'-phosphorothioate; note = sugar modification: 2'-O-methoxyethylribose
  modified_base 2: mod_base = OTHER; note = backbone modification: 5'-phosphorothioate; note = thymine; note = sugar modification: 2'-O-methoxyethylribose
  modified_base 3: mod_base = OTHER; note = backbone modification: 5'-phosphorothioate; note = sugar modification: 2'-O-methoxyethylribose
  modified_base 4: mod_base = OTHER; note = thymine; note = sugar modification: 2'-O-methoxyethylribose; note = backbone modification: 5'-phosphorothioate
  modified_base 5: mod_base = OTHER; note = thymine; note = sugar modification: 2'-O-methoxyethylribose; note = backbone modification: 5'-phosphorothioate
  modified_base 6: mod_base = OTHER; note = sugar modification: 2'-O-methoxyethylribose; note = thymine; note = backbone modification: 5'-phosphorothioate
  modified_base 7: mod_base = OTHER; note = sugar modification: 2'-O-methoxyethylribose; note = backbone modification: 5'-phosphorothioate; note = thymine
  modified_base 8: mod_base = OTHER; note = sugar modification: 2'-O-methoxyethylribose; note = backbone modification: 5'-phosphorothioate
  modified_base 9: mod_base = OTHER; note = thymine; note = backbone modification: 5'-phosphorothioate; note = sugar modification: 2'-O-methoxyethylribose
  modified_base 10: mod_base = OTHER; note = thymine; note = sugar modification: 2'-O-methoxyethylribose; note = backbone modification: 5'-phosphorothioate
  modified_base 11: mod_base = OTHER; note = backbone modification: 5'-phosphorothioate; note = thymine; note = sugar modification: 2'-O-methoxyethylribose
  modified_base 12: mod_base = OTHER; note = backbone modification: 5'-phosphorothioate; note = thymine; note = sugar modification: 2'-O-methoxyethylribose
  modified_base 13: mod_base = OTHER; note = sugar modification: 2'-O-methoxyethylribose; note = backbone modification: 5'-phosphorothioate
  modified_base 14: mod_base = OTHER; note = sugar modification: 2'-O-methoxyethylribose; note = backbone modification: 5'-phosphorothioate
  modified_base 15: mod_base = OTHER; note = backbone modification: 5'-phosphorothioate; note = sugar modification: 2'-O-methoxyethylribose
  modified_base 16: mod_base = OTHER; note = sugar modification: 2'-O-methoxyethylribose; note = backbone modification: 5'-phosphorothioate
  modified_base 17: mod_base = OTHER; note = sugar modification: 2'-O-methoxyethylribose; note = backbone modification: 5'-phosphorothioate
  modified_base 18: mod_base = OTHER; note = sugar modification: 2'-O-methoxyethylribose
gtattttattttaaaaag

SEQ ID NO: 389 - RNA, 18 nt, synthetic construct
  source 1..18: mol_type = other RNA; note = Antisense oligonucleotide
  modified_base 1: mod_base = OTHER; note = backbone modification: 5'-phosphorothioate; note = sugar modification: 2'-O-methoxyethylribose
  modified_base 2: mod_base = OTHER; note = backbone modification: 5'-phosphorothioate; note = sugar modification: 2'-O-methoxyethylribose
  modified_base 3: mod_base = m5c; mod_base = OTHER; note = backbone modification: 5'-phosphorothioate; note = sugar modification: 2'-O-methoxyethylribose
  modified_base 4: mod_base = OTHER; mod_base = m5c; note = sugar modification: 2'-O-methoxyethylribose; note = backbone modification: 5'-phosphorothioate
  modified_base 5: mod_base = OTHER; note = backbone modification: 5'-phosphorothioate; note = sugar modification: 2'-O-methoxyethylribose
  modified_base 6: mod_base = OTHER; note = sugar modification: 2'-O-methoxyethylribose; note = backbone modification: 5'-phosphorothioate
  modified_base 7: mod_base = OTHER; note = backbone modification: 5'-phosphorothioate; note = sugar modification: 2'-O-methoxyethylribose; note = thymine
  modified_base 8: mod_base = OTHER; note = backbone modification: 5'-phosphorothioate; note = sugar modification: 2'-O-methoxyethylribose
  modified_base 9: mod_base = OTHER; note = thymine; note = backbone modification: 5'-phosphorothioate; note = sugar modification: 2'-O-methoxyethylribose
  modified_base 10: mod_base = OTHER; note = sugar modification: 2'-O-methoxyethylribose; note = thymine; note = backbone modification: 5'-phosphorothioate
  modified_base 11: mod_base = OTHER; note = sugar modification: 2'-O-methoxyethylribose; note = thymine; note = backbone modification: 5'-phosphorothioate
  modified_base 12: mod_base = OTHER; note = backbone modification: 5'-phosphorothioate; note = thymine; note = sugar modification: 2'-O-methoxyethylribose
  modified_base 13: mod_base = OTHER; note = backbone modification: 5'-phosphorothioate; note = sugar modification: 2'-O-methoxyethylribose
  modified_base 14: mod_base = OTHER; note = thymine; note = sugar modification: 2'-O-methoxyethylribose; note = backbone modification: 5'-phosphorothioate
  modified_base 15: mod_base = OTHER; note = thymine; note = sugar modification: 2'-O-methoxyethylribose; note = backbone modification: 5'-phosphorothioate
  modified_base 16: mod_base = OTHER; note = sugar modification: 2'-O-methoxyethylribose; note = thymine; note = backbone modification: 5'-phosphorothioate
  modified_base 17: mod_base = OTHER; note = sugar modification: 2'-O-methoxyethylribose; note = backbone modification: 5'-phosphorothioate; note = thymine
  modified_base 18: mod_base = OTHER; note = sugar modification: 2'-O-methoxyethylribose
aaccagtattttatttta

SEQ ID NO: 390 - RNA, 18 nt, synthetic construct
  source 1..18: mol_type = other RNA; note = Antisense oligonucleotide
  modified_base 1: mod_base = OTHER; note = backbone modification: 5'-phosphorothioate; note = sugar modification: 2'-O-methoxyethylribose
  modified_base 2: mod_base = OTHER; note = backbone modification: 5'-phosphorothioate; note = sugar modification: 2'-O-methoxyethylribose
  modified_base 3: mod_base = OTHER; note = thymine; note = backbone modification: 5'-phosphorothioate; note = sugar modification: 2'-O-methoxyethylribose
  modified_base 4: mod_base = OTHER; note = backbone modification: 5'-phosphorothioate; note = sugar modification: 2'-O-methoxyethylribose
  modified_base 5: mod_base = OTHER; note = sugar modification: 2'-O-methoxyethylribose; note = backbone modification: 5'-phosphorothioate; note = thymine
  modified_base 6: mod_base = OTHER; note = sugar modification: 2'-O-methoxyethylribose; note = backbone modification: 5'-phosphorothioate
  modified_base 7: mod_base = OTHER; note = backbone modification: 5'-phosphorothioate; note = sugar modification: 2'-O-methoxyethylribose
  modified_base 8: mod_base = OTHER; mod_base = m5c; note = backbone modification: 5'-phosphorothioate; note = sugar modification: 2'-O-methoxyethylribose
  modified_base 9: mod_base = OTHER; mod_base = m5c; note = backbone modification: 5'-phosphorothioate; note = sugar modification: 2'-O-methoxyethylribose
  modified_base 10: mod_base = OTHER; note = backbone modification: 5'-phosphorothioate; note = sugar modification: 2'-O-methoxyethylribose
  modified_base 11: mod_base = OTHER; note = sugar modification: 2'-O-methoxyethylribose; note = backbone modification: 5'-phosphorothioate
  modified_base 12: mod_base = OTHER; note = thymine; note = sugar modification: 2'-O-methoxyethylribose; note = backbone modification: 5'-phosphorothioate
  modified_base 13: mod_base = OTHER; note = sugar modification: 2'-O-methoxyethylribose; note = backbone modification: 5'-phosphorothioate
  modified_base 14: mod_base = OTHER; note = backbone modification: 5'-phosphorothioate; note = thymine; note = sugar modification: 2'-O-methoxyethylribose
  modified_base 15: mod_base = OTHER; note = backbone modification: 5'-phosphorothioate; note = sugar modification: 2'-O-methoxyethylribose; note = thymine
  modified_base 16: mod_base = OTHER; note = backbone modification: 5'-phosphorothioate; note = thymine; note = sugar modification: 2'-O-methoxyethylribose
  modified_base 17: mod_base = OTHER; note = sugar modification: 2'-O-methoxyethylribose; note = thymine; note = backbone modification: 5'-phosphorothioate
  modified_base 18: mod_base = OTHER; note = sugar modification: 2'-O-methoxyethylribose
aatgtaaccagtatttta

SEQ ID NO: 391 - RNA, 18 nt, synthetic construct
  source 1..18: mol_type = other RNA; note = Antisense oligonucleotide
  modified_base 1: mod_base = OTHER; note = sugar modification: 2'-O-methoxyethylribose; note = backbone modification: 5'-phosphorothioate; note = thymine
  modified_base 2: mod_base = OTHER; note = sugar modification: 2'-O-methoxyethylribose; note = backbone modification: 5'-phosphorothioate
  modified_base 3: mod_base = OTHER; note = backbone modification: 5'-phosphorothioate; note = sugar modification: 2'-O-methoxyethylribose; note = thymine
  modified_base 4: mod_base = OTHER; mod_base = m5c; note = sugar modification: 2'-O-methoxyethylribose; note = backbone modification: 5'-phosphorothioate
  modified_base 5: mod_base = OTHER; note = sugar modification: 2'-O-methoxyethylribose; note = backbone modification: 5'-phosphorothioate
  modified_base 6: mod_base = OTHER; note = backbone modification: 5'-phosphorothioate; note = sugar modification: 2'-O-methoxyethylribose
  modified_base 7: mod_base = OTHER; note = sugar modification: 2'-O-methoxyethylribose; note = backbone modification: 5'-phosphorothioate
  modified_base 8: mod_base = OTHER; note = sugar modification: 2'-O-methoxyethylribose; note = thymine; note = backbone modification: 5'-phosphorothioate
  modified_base 9: mod_base = OTHER; note = backbone modification: 5'-phosphorothioate; note = sugar modification: 2'-O-methoxyethylribose
  modified_base 10: mod_base = OTHER; note = thymine; note = backbone modification: 5'-phosphorothioate; note = sugar modification: 2'-O-methoxyethylribose
  modified_base 11: mod_base = OTHER; note = sugar modification: 2'-O-methoxyethylribose; note = backbone modification: 5'-phosphorothioate
  modified_base 12: mod_base = OTHER; note = sugar modification: 2'-O-methoxyethylribose; note = backbone modification: 5'-phosphorothioate
  modified_base 13: mod_base = m5c; mod_base = OTHER; note = sugar modification: 2'-O-methoxyethylribose; note = backbone modification: 5'-phosphorothioate
  modified_base 14: mod_base = m5c; mod_base = OTHER; note = sugar modification: 2'-O-methoxyethylribose; note = backbone modification: 5'-phosphorothioate
  modified_base 15: mod_base = OTHER; note = backbone modification: 5'-phosphorothioate; note = sugar modification: 2'-O-methoxyethylribose
  modified_base 16: mod_base = OTHER; note = sugar modification: 2'-O-methoxyethylribose; note = backbone modification: 5'-phosphorothioate
  modified_base 17: mod_base = OTHER; note = thymine; note = backbone modification: 5'-phosphorothioate; note = sugar modification: 2'-O-methoxyethylribose
  modified_base 18: mod_base = OTHER; note = sugar modification: 2'-O-methoxyethylribose
tatcaaatgtaaccagta

SEQ ID NO: 392 - RNA, 18 nt, synthetic construct
  source 1..18: mol_type = other RNA; note = Antisense oligonucleotide
  modified_base 1: mod_base = OTHER; note = thymine; note = backbone modification: 5'-phosphorothioate; note = sugar modification: lna
  modified_base 2: mod_base = OTHER; note = sugar modification: lna; note = backbone modification: 5'-phosphorothioate
  modified_base 3: mod_base = OTHER; note = backbone modification: 5'-phosphorothioate; note = sugar modification: 2'-O-methoxyethylribose
  modified_base 4: mod_base = OTHER; note = sugar modification: 2'-O-methoxyethylribose; note = thymine; note = backbone modification: 5'-phosphorothioate
  modified_base 5: mod_base = OTHER; note = backbone modification: 5'-phosphorothioate; note = thymine; note = sugar modification: 2'-O-methoxyethylribose
  modified_base 6: mod_base = OTHER; mod_base = m5c; note = backbone modification: 5'-phosphorothioate; note = sugar modification: 2'-O-methoxyethylribose
  modified_base 7: mod_base = OTHER; note = backbone modification: 5'-phosphorothioate; note = thymine; note = sugar modification: 2'-O-methoxyethylribose
  modified_base 8: mod_base = OTHER; note = backbone modification: 5'-phosphorothioate; note = sugar modification: 2'-O-methoxyethylribose
  modified_base 9: mod_base = OTHER; note = sugar modification: 2'-O-methoxyethylribose; note = backbone modification: 5'-phosphorothioate
  modified_base 10: mod_base = OTHER; note = backbone modification: 5'-phosphorothioate; note = sugar modification: 2'-O-methoxyethylribose
  modified_base 11: mod_base = OTHER; note = backbone modification: 5'-phosphorothioate; note = sugar modification: 2'-O-methoxyethylribose; note = thymine
  modified_base 12: mod_base = OTHER; note = sugar modification: 2'-O-methoxyethylribose; note = backbone modification: 5'-phosphorothioate; note = thymine
  modified_base 13: mod_base = OTHER; mod_base = m5c; note = backbone modification: 5'-phosphorothioate; note = sugar modification: 2'-O-methoxyethylribose
  modified_base 14: mod_base = OTHER; note = sugar modification: 2'-O-methoxyethylribose; note = backbone modification: 5'-phosphorothioate; note = thymine
  modified_base 15: mod_base = OTHER; note = backbone modification: 5'-phosphorothioate; note = thymine; note = sugar modification: 2'-O-methoxyethylribose
  modified_base 16: mod_base = OTHER; note = sugar modification: 2'-O-methoxyethylribose; note = backbone modification: 5'-phosphorothioate; note = thymine
  modified_base 17: mod_base = m5c; mod_base = OTHER; note = backbone modification: 5'-phosphorothioate; note = sugar modification: lna
  modified_base 18: mod_base = OTHER; note = sugar modification: lna
tgattctgaattctttca

SEQ ID NO: 393 - RNA, 18 nt, synthetic construct
  source 1..18: mol_type = other RNA; note = Antisense oligonucleotide
  modified_base 1: mod_base = OTHER; mod_base = m5c; note = backbone modification: 5'-phosphorothioate; note = sugar modification: lna
  modified_base 2: mod_base = OTHER; note = thymine; note = sugar modification: lna; note = backbone modification: 5'-phosphorothioate
  modified_base 3: mod_base = OTHER; note = backbone modification: 5'-phosphorothioate; note = sugar modification: 2'-O-methoxyethylribose
  modified_base 4: mod_base = OTHER; note = sugar modification: 2'-O-methoxyethylribose; note = backbone modification: 5'-phosphorothioate
  modified_base 5: mod_base = OTHER; note = backbone modification: 5'-phosphorothioate; note = thymine; note = sugar modification: 2'-O-methoxyethylribose
  modified_base 6: mod_base = OTHER; note = thymine; note = sugar modification: 2'-O-methoxyethylribose; note = backbone modification: 5'-phosphorothioate
  modified_base 7: mod_base = OTHER; mod_base = m5c; note = sugar modification: 2'-O-methoxyethylribose; note = backbone modification: 5'-phosphorothioate
  modified_base 8: mod_base = OTHER; note = sugar modification: 2'-O-methoxyethylribose; note = thymine; note = backbone modification: 5'-phosphorothioate
  modified_base 9: mod_base = OTHER; note = sugar modification: 2'-O-methoxyethylribose; note = backbone modification: 5'-phosphorothioate
  modified_base 10: mod_base = OTHER; note = backbone modification: 5'-phosphorothioate; note = sugar modification: 2'-O-methoxyethylribose
  modified_base 11: mod_base = OTHER; note = sugar modification: 2'-O-methoxyethylribose; note = backbone modification: 5'-phosphorothioate
  modified_base 12: mod_base = OTHER; note = sugar modification: 2'-O-methoxyethylribose; note = backbone modification: 5'-phosphorothioate; note = thymine
  modified_base 13: mod_base = OTHER; note = backbone modification: 5'-phosphorothioate; note = thymine; note = sugar modification: 2'-O-methoxyethylribose
  modified_base 14: mod_base = OTHER; mod_base = m5c; note = sugar modification: 2'-O-methoxyethylribose; note = backbone modification: 5'-phosphorothioate
  modified_base 15: mod_base = OTHER; note = sugar modification: 2'-O-methoxyethylribose; note = thymine; note = backbone modification: 5'-phosphorothioate
  modified_base 16: mod_base = OTHER; note = backbone modification: 5'-phosphorothioate; note = thymine; note = sugar modification: 2'-O-methoxyethylribose
  modified_base 17: mod_base = OTHER; note = thymine; note = sugar modification: lna; note = backbone modification: 5'-phosphorothioate
  modified_base 18: mod_base = m5c; mod_base = OTHER; note = sugar modification: lna
ctgattctgaattctttc

SEQ ID NO: 394 - RNA, 18 nt, synthetic construct
  source 1..18: mol_type = other RNA; note = Antisense oligonucleotide
  modified_base 1: mod_base = OTHER; note = sugar modification: lna; note = backbone modification: 5'-phosphorothioate
  modified_base 2: mod_base = m5c; mod_base = OTHER; note = sugar modification: lna; note = backbone modification: 5'-phosphorothioate
  modified_base 3: mod_base = OTHER; note = thymine; note = backbone modification: 5'-phosphorothioate; note = sugar modification: 2'-O-methoxyethylribose
  modified_base 4: mod_base = OTHER; note = sugar modification: 2'-O-methoxyethylribose; note = backbone modification: 5'-phosphorothioate
  modified_base 5: mod_base = OTHER; note = sugar modification: 2'-O-methoxyethylribose; note = backbone modification: 5'-phosphorothioate
  modified_base 6: mod_base = OTHER; note = thymine; note = backbone modification: 5'-phosphorothioate; note = sugar modification: 2'-O-methoxyethylribose
  modified_base 7: mod_base = OTHER; note = backbone modification: 5'-phosphorothioate; note = thymine; note = sugar modification: 2'-O-methoxyethylribose
  modified_base 8: mod_base = OTHER; mod_base = m5c; note = sugar modification: 2'-O-methoxyethylribose; note = backbone modification: 5'-phosphorothioate
  modified_base 9: mod_base = OTHER; note = sugar modification: 2'-O-methoxyethylribose; note = thymine; note = backbone modification: 5'-phosphorothioate
  modified_base 10: mod_base = OTHER; note = sugar modification: 2'-O-methoxyethylribose; note = backbone modification: 5'-phosphorothioate
  modified_base 11: mod_base = OTHER; note = sugar modification: 2'-O-methoxyethylribose; note = backbone modification: 5'-phosphorothioate
  modified_base 12: mod_base = OTHER; note = backbone modification: 5'-phosphorothioate; note = sugar modification: 2'-O-methoxyethylribose
  modified_base 13: mod_base = OTHER; note = thymine; note = backbone modification: 5'-phosphorothioate; note = sugar modification: 2'-O-methoxyethylribose
  modified_base 14: mod_base = OTHER; note = thymine; note = sugar modification: 2'-O-methoxyethylribose; note = backbone modification: 5'-phosphorothioate
  modified_base 15: mod_base = OTHER; mod_base = m5c; note = backbone modification: 5'-phosphorothioate; note = sugar modification: 2'-O-methoxyethylribose
  modified_base 16: mod_base = OTHER; note = sugar modification: 2'-O-methoxyethylribose; note = backbone modification: 5'-phosphorothioate; note = thymine
  modified_base 17: mod_base = OTHER; note = thymine; note = backbone modification: 5'-phosphorothioate; note = sugar modification: lna
  modified_base 18: mod_base = OTHER; note = sugar modification: lna; note = thymine
actgattctgaattcttt

SEQ ID NO: 395 - RNA, 18 nt, synthetic construct
  source 1..18: mol_type = other RNA; note = Antisense oligonucleotide
  modified_base 1: mod_base = OTHER; mod_base = m5c; note = sugar modification: lna; note = backbone modification: 5'-phosphorothioate
  modified_base 2: mod_base = OTHER; note = backbone modification: 5'-phosphorothioate; note = sugar modification: lna
  modified_base 3: mod_base = m5c; mod_base = OTHER; note = sugar modification: 2'-O-methoxyethylribose; note = backbone modification: 5'-phosphorothioate
  modified_base 4: mod_base = OTHER; note = thymine; note = sugar modification: 2'-O-methoxyethylribose; note = backbone modification: 5'-phosphorothioate
  modified_base 5: mod_base = OTHER; note = sugar modification: 2'-O-methoxyethylribose; note = backbone modification: 5'-phosphorothioate
  modified_base 6: mod_base = OTHER; note = backbone modification: 5'-phosphorothioate; note = sugar modification: 2'-O-methoxyethylribose
  modified_base 7: mod_base = OTHER; note = thymine; note = backbone modification: 5'-phosphorothioate; note = sugar modification: 2'-O-methoxyethylribose
  modified_base 8: mod_base = OTHER; note = thymine; note = backbone modification: 5'-phosphorothioate; note = sugar modification: 2'-O-methoxyethylribose
  modified_base 9: mod_base = m5c; mod_base = OTHER; note = sugar modification: 2'-O-methoxyethylribose; note = backbone modification: 5'-phosphorothioate
  modified_base 10: mod_base = OTHER; note = thymine; note = sugar modification: 2'-O-methoxyethylribose; note = backbone modification: 5'-phosphorothioate
  modified_base 11: mod_base = OTHER; note = backbone modification: 5'-phosphorothioate; note = sugar modification: 2'-O-methoxyethylribose
  modified_base 12: mod_base = OTHER; note = backbone modification: 5'-phosphorothioate; note = sugar modification: 2'-O-methoxyethylribose
  modified_base 13: mod_base = OTHER; note = backbone modification: 5'-phosphorothioate; note = sugar modification: 2'-O-methoxyethylribose
  modified_base 14: mod_base = OTHER; note = sugar modification: 2'-O-methoxyethylribose; note = backbone modification: 5'-phosphorothioate; note = thymine
  modified_base 15: mod_base = OTHER; note = thymine; note = backbone modification: 5'-phosphorothioate; note = sugar modification: 2'-O-methoxyethylribose
  modified_base 16: mod_base = m5c; mod_base = OTHER; note = sugar modification: 2'-O-methoxyethylribose; note = backbone modification: 5'-phosphorothioate
  modified_base 17: mod_base = OTHER; note = backbone modification: 5'-phosphorothioate; note = sugar modification: lna; note = thymine
  modified_base 18: mod_base = OTHER; note = thymine; note = sugar modification: lna
cactgattctgaattctt

SEQ ID NO: 396 - RNA, 18 nt, synthetic construct
  source 1..18: mol_type = other RNA; note = Antisense oligonucleotide
  modified_base 1: mod_base = OTHER; mod_base = m5c; note = sugar modification: lna; note = backbone modification: 5'-phosphorothioate
  modified_base 2: mod_base = OTHER; mod_base = m5c; note = sugar modification: lna; note = backbone modification: 5'-phosphorothioate
  modified_base 3: mod_base = OTHER; note = backbone modification: 5'-phosphorothioate; note = sugar modification: 2'-O-methoxyethylribose
  modified_base 4: mod_base = OTHER; mod_base = m5c; note = backbone modification: 5'-phosphorothioate; note = sugar modification: 2'-O-methoxyethylribose
  modified_base 5: mod_base = OTHER; note = backbone modification: 5'-phosphorothioate; note = thymine; note = sugar modification: 2'-O-methoxyethylribose
  modified_base 6: mod_base = OTHER; note = backbone modification: 5'-phosphorothioate; note = sugar modification: 2'-O-methoxyethylribose
  modified_base 7: mod_base = OTHER; note = sugar modification: 2'-O-methoxyethylribose; note = backbone modification: 5'-phosphorothioate
  modified_base 8: mod_base = OTHER; note = thymine; note = sugar modification: 2'-O-methoxyethylribose; note = backbone modification: 5'-phosphorothioate
  modified_base 9: mod_base = OTHER; note = sugar modification: 2'-O-methoxyethylribose; note = thymine; note = backbone modification: 5'-phosphorothioate
  modified_base 10: mod_base = OTHER; mod_base = m5c; note = backbone modification: 5'-phosphorothioate; note = sugar modification: 2'-O-methoxyethylribose
  modified_base 11: mod_base = OTHER; note = thymine; note = backbone modification: 5'-phosphorothioate; note = sugar modification: 2'-O-methoxyethylribose
  modified_base 12: mod_base = OTHER; note = backbone modification: 5'-phosphorothioate; note = sugar modification: 2'-O-methoxyethylribose
  modified_base 13: mod_base = OTHER; note = sugar modification: 2'-O-methoxyethylribose; note = backbone modification: 5'-phosphorothioate
  modified_base 14: mod_base = OTHER; note = sugar modification: 2'-O-methoxyethylribose; note = backbone modification: 5'-phosphorothioate
  modified_base 15: mod_base = OTHER; note = thymine; note = sugar modification: 2'-O-methoxyethylribose; note = backbone modification: 5'-phosphorothioate
  modified_base 16: mod_base = OTHER; note = thymine; note = backbone modification: 5'-phosphorothioate; note = sugar modification: 2'-O-methoxyethylribose
  modified_base 17: mod_base = OTHER; mod_base = m5c; note = sugar modification: lna; note = backbone modification: 5'-phosphorothioate
  modified_base 18: mod_base = OTHER; note = thymine; note = sugar modification: lna
ccactgattctgaattct

SEQ ID NO: 397 - RNA, 18 nt, synthetic construct
  source 1..18: mol_type = other RNA; note = Antisense oligonucleotide
  modified_base 1: mod_base = m5c; mod_base = OTHER; note = backbone modification: 5'-phosphorothioate; note = sugar modification: lna
  modified_base 2: mod_base = m5c; mod_base = OTHER; note = backbone modification: 5'-phosphorothioate; note = sugar modification: lna
  modified_base 3: mod_base = m5c; mod_base = OTHER; note = backbone modification: 5'-phosphorothioate; note = sugar modification: 2'-O-methoxyethylribose
  modified_base 4: mod_base = OTHER; note = backbone modification: 5'-phosphorothioate; note = sugar modification: 2'-O-methoxyethylribose
  modified_base 5: mod_base = m5c; mod_base = OTHER; note = sugar modification: 2'-O-methoxyethylribose; note = backbone modification: 5'-phosphorothioate
  modified_base 6: mod_base = OTHER; note = thymine; note = backbone modification: 5'-phosphorothioate; note = sugar modification: 2'-O-methoxyethylribose
  modified_base 7: mod_base = OTHER; note = backbone modification: 5'-phosphorothioate; note = sugar modification: 2'-O-methoxyethylribose
  modified_base 8: mod_base = OTHER; note = backbone modification: 5'-phosphorothioate; note = sugar modification: 2'-O-methoxyethylribose
  modified_base 9: mod_base = OTHER; note = thymine; note = sugar modification: 2'-O-methoxyethylribose; note = backbone modification: 5'-phosphorothioate
  modified_base 10: mod_base = OTHER; note = thymine; note = backbone modification: 5'-phosphorothioate; note = sugar modification: 2'-O-methoxyethylribose
  modified_base 11: mod_base = OTHER; mod_base = m5c; note = sugar modification: 2'-O-methoxyethylribose; note = backbone modification: 5'-phosphorothioate
  modified_base 12: mod_base = OTHER; note = thymine; note = backbone modification: 5'-phosphorothioate; note = sugar modification: 2'-O-methoxyethylribose
  modified_base 13: mod_base = OTHER; note = sugar modification: 2'-O-methoxyethylribose; note = backbone modification: 5'-phosphorothioate
  modified_base 14: mod_base = OTHER; note = backbone modification: 5'-phosphorothioate; note = sugar modification: 2'-O-methoxyethylribose
  modified_base 15: mod_base = OTHER; note = sugar modification: 2'-O-methoxyethylribose; note = backbone modification: 5'-phosphorothioate
  modified_base 16: mod_base = OTHER; note = thymine; note = sugar modification: 2'-O-methoxyethylribose; note = backbone modification: 5'-phosphorothioate
  modified_base 17: mod_base = OTHER; note = sugar modification: lna; note = backbone modification: 5'-phosphorothioate; note = thymine
  modified_base 18: mod_base = m5c; mod_base = OTHER; note = sugar modification: lna
cccactgattctgaattc

SEQ ID NO: 398 - RNA, 18 nt, synthetic construct
  source 1..18: mol_type = other RNA; note = Antisense oligonucleotide
  modified_base 1: mod_base = OTHER; note = thymine; note = sugar modification: lna; note = backbone modification: 5'-phosphorothioate
  modified_base 2: mod_base = OTHER; mod_base = m5c; note = sugar modification: lna; note = backbone modification: 5'-phosphorothioate
  modified_base 3: mod_base = m5c; mod_base = OTHER; note = sugar modification: 2'-O-methoxyethylribose; note = backbone modification: 5'-phosphorothioate
  modified_base 4: mod_base = m5c; mod_base = OTHER; note = sugar modification: 2'-O-methoxyethylribose; note = backbone modification: 5'-phosphorothioate
  modified_base 5: mod_base = OTHER; note = sugar modification: 2'-O-methoxyethylribose; note = backbone modification: 5'-phosphorothioate
  modified_base 6: mod_base = OTHER; mod_base = m5c; note = sugar modification: 2'-O-methoxyethylribose; note = backbone modification: 5'-phosphorothioate
  modified_base 7: mod_base = OTHER; note = thymine; note = sugar modification: 2'-O-methoxyethylribose; note = backbone modification: 5'-phosphorothioate
  modified_base 8: mod_base = OTHER; note = sugar modification: 2'-O-methoxyethylribose; note = backbone modification: 5'-phosphorothioate
  modified_base 9: mod_base = OTHER; note = sugar modification: 2'-O-methoxyethylribose; note = backbone modification: 5'-phosphorothioate
  modified_base 10: mod_base = OTHER; note = backbone modification: 5'-phosphorothioate; note = thymine; note = sugar modification: 2'-O-methoxyethylribose
  modified_base 11: mod_base = OTHER; note = thymine; note = sugar modification: 2'-O-methoxyethylribose; note = backbone modification: 5'-phosphorothioate
  modified_base 12: mod_base = m5c; mod_base = OTHER; note = sugar modification: 2'-O-methoxyethylribose; note = backbone modification: 5'-phosphorothioate
  modified_base 13: mod_base = OTHER; note = thymine; note = backbone modification: 5'-phosphorothioate; note = sugar modification: 2'-O-methoxyethylribose
  modified_base 14: mod_base = OTHER; note = sugar modification: 2'-O-methoxyethylribose; note = backbone modification: 5'-phosphorothioate
  modified_base 15: mod_base = OTHER; note = sugar modification: 2'-O-methoxyethylribose; note = backbone modification: 5'-phosphorothioate
  modified_base 16: mod_base = OTHER; note = sugar modification: 2'-O-methoxyethylribose; note = backbone modification: 5'-phosphorothioate
  modified_base 17: mod_base = OTHER; note = sugar modification: lna; note = backbone modification: 5'-phosphorothioate; note = thymine
  modified_base 18: mod_base = OTHER; note = sugar modification: lna; note = thymine
tcccactgattctgaatt

SEQ ID NO: 399 - RNA, 18 nt, synthetic construct
  source 1..18: mol_type = other RNA; note = Antisense oligonucleotide
  modified_base 1: mod_base = OTHER; note = backbone modification: 5'-phosphorothioate; note = sugar modification: lna
  modified_base 2: mod_base = OTHER; note = sugar modification: lna; note = backbone modification: 5'-phosphorothioate; note = thymine
  modified_base 3: mod_base = OTHER; mod_base = m5c; note = backbone modification: 5'-phosphorothioate; note = sugar modification: 2'-O-methoxyethylribose
  modified_base 4: mod_base = OTHER; mod_base = m5c; note = sugar modification: 2'-O-methoxyethylribose; note = backbone modification: 5'-phosphorothioate
  modified_base 5: mod_base = m5c; mod_base = OTHER; note = sugar modification: 2'-O-methoxyethylribose; note = backbone modification: 5'-phosphorothioate
  modified_base 6: mod_base = OTHER; note = sugar modification: 2'-O-methoxyethylribose; note = backbone modification: 5'-phosphorothioate
  modified_base 7: mod_base = m5c; mod_base = OTHER; note = backbone modification: 5'-phosphorothioate; note = sugar modification: 2'-O-methoxyethylribose
  modified_base 8: mod_base = OTHER; note = thymine; note = backbone modification: 5'-phosphorothioate; note = sugar modification: 2'-O-methoxyethylribose
  modified_base 9: mod_base = OTHER; note = sugar modification: 2'-O-methoxyethylribose; note = backbone modification: 5'-phosphorothioate
  modified_base 10: mod_base = OTHER; note = backbone modification: 5'-phosphorothioate; note = sugar modification: 2'-O-methoxyethylribose
  modified_base 11: mod_base = OTHER; note = thymine; note = sugar modification: 2'-O-methoxyethylribose; note = backbone modification: 5'-phosphorothioate
  modified_base 12: mod_base = OTHER; note = thymine; note = sugar modification: 2'-O-methoxyethylribose; note = backbone modification: 5'-phosphorothioate
  modified_base 13: mod_base = OTHER; mod_base = m5c; note = backbone modification: 5'-phosphorothioate; note = sugar modification: 2'-O-methoxyethylribose
  modified_base 14: mod_base = OTHER; note = sugar modification: 2'-O-methoxyethylribose; note = backbone modification: 5'-phosphorothioate; note = thymine
  modified_base 15: mod_base = OTHER; note = backbone modification: 5'-phosphorothioate; note = sugar modification: 2'-O-methoxyethylribose
  modified_base 16: mod_base = OTHER; note = sugar modification: 2'-O-methoxyethylribose; note = backbone modification: 5'-phosphorothioate
  modified_base 17: mod_base = OTHER; note = sugar modification: lna; note = backbone modification: 5'-phosphorothioate
  modified_base 18: mod_base = OTHER; note = thymine; note = sugar modification: lna
atcccactgattctgaat

SEQ ID NO: 400 - RNA, 18 nt, synthetic construct
  source 1..18: mol_type = other RNA; note = Antisense oligonucleotide
  modified_base 1: mod_base = OTHER; mod_base = m5c; note = backbone modification: 5'-phosphorothioate; note = sugar modification: lna
  modified_base 2: mod_base = OTHER; note = backbone modification: 5'-phosphorothioate; note = sugar modification: lna
  modified_base 3: mod_base = OTHER; note = backbone modification: 5'-phosphorothioate; note = sugar modification: 2'-O-methoxyethylribose; note = thymine
  modified_base 4: mod_base = OTHER; mod_base = m5c; note = sugar modification: 2'-O-methoxyethylribose; note = backbone modification: 5'-phosphorothioate
  modified_base 5: mod_base = OTHER; mod_base = m5c; note = sugar modification: 2'-O-methoxyethylribose; note = backbone modification: 5'-phosphorothioate
  modified_base 6: mod_base = OTHER; mod_base = m5c; note = backbone modification: 5'-phosphorothioate; note = sugar modification: 2'-O-methoxyethylribose
  modified_base 7: mod_base = OTHER; note = backbone modification: 5'-phosphorothioate; note = sugar modification: 2'-O-methoxyethylribose
  modified_base 8: mod_base = m5c; mod_base = OTHER; note = sugar modification: 2'-O-methoxyethylribose; note = backbone modification: 5'-phosphorothioate
  modified_base 9: mod_base = OTHER; note = backbone modification: 5'-phosphorothioate; note = sugar modification: 2'-O-methoxyethylribose; note = thymine
  modified_base 10: mod_base = OTHER; note = sugar modification: 2'-O-methoxyethylribose; note = backbone modification: 5'-phosphorothioate
  modified_base 11: mod_base = OTHER; note = sugar modification: 2'-O-methoxyethylribose; note = backbone modification: 5'-phosphorothioate
  modified_base 12: mod_base = OTHER; note = backbone modification: 5'-phosphorothioate; note = sugar modification: 2'-O-methoxyethylribose; note = thymine
  modified_base 13: mod_base = OTHER; note = thymine; note = backbone modification: 5'-phosphorothioate; note = sugar modification: 2'-O-methoxyethylribose
  modified_base 14: mod_base = OTHER; mod_base = m5c; note = sugar modification: 2'-O-methoxyethylribose; note = backbone modification: 5'-phosphorothioate
  modified_base 15: mod_base = OTHER; note = thymine; note = backbone modification: 5'-phosphorothioate; note = sugar modification: 2'-O-methoxyethylribose
  modified_base 16: mod_base = OTHER; note = sugar modification: 2'-O-methoxyethylribose; note = backbone modification: 5'-phosphorothioate
  modified_base 17: mod_base = OTHER; note = backbone modification: 5'-phosphorothioate; note = sugar modification: lna
  modified_base 18: mod_base = OTHER; note = sugar modification: lna
catcccactgattctgaa

SEQ ID NO: 401 - RNA, 18 nt, synthetic construct
  source 1..18: mol_type = other RNA; note = Antisense oligonucleotide
  modified_base 1: mod_base = OTHER; note = thymine; note = sugar modification: lna; note = backbone modification: 5'-phosphorothioate
  modified_base 2: mod_base = m5c; mod_base = OTHER; note = backbone modification: 5'-phosphorothioate; note = sugar modification: lna
  modified_base 3: mod_base = OTHER; note = backbone modification: 5'-phosphorothioate; note = sugar modification: 2'-O-methoxyethylribose
  modified_base 4: mod_base = OTHER; note = thymine; note = sugar modification: 2'-O-methoxyethylribose; note = backbone modification: 5'-phosphorothioate
  modified_base 5: mod_base = m5c; mod_base = OTHER; note = sugar modification: 2'-O-methoxyethylribose; note = backbone modification: 5'-phosphorothioate
  modified_base 6: mod_base = OTHER; mod_base = m5c; note = backbone modification: 5'-phosphorothioate; note = sugar modification: 2'-O-methoxyethylribose
  modified_base 7: mod_base = OTHER; mod_base = m5c; note = sugar modification: 2'-O-methoxyethylribose; note = backbone modification: 5'-phosphorothioate
  modified_base 8: mod_base = OTHER; note = backbone modification: 5'-phosphorothioate; note = sugar modification: 2'-O-methoxyethylribose
  modified_base 9: mod_base = OTHER; mod_base = m5c; note = sugar modification: 2'-O-methoxyethylribose; note = backbone modification: 5'-phosphorothioate
  modified_base 10: mod_base = OTHER; note = sugar modification: 2'-O-methoxyethylribose; note = thymine; note = backbone modification: 5'-phosphorothioate
  modified_base 11: mod_base = OTHER; note = backbone modification: 5'-phosphorothioate; note = sugar modification: 2'-O-methoxyethylribose
  modified_base 12: mod_base = OTHER; note = sugar modification: 2'-O-methoxyethylribose; note = backbone modification: 5'-phosphorothioate
  modified_base 13: mod_base = OTHER; note = sugar modification: 2'-O-methoxyethylribose; note = thymine; note = backbone modification: 5'-phosphorothioate
  modified_base 14: mod_base = OTHER; note = thymine; note = backbone modification: 5'-phosphorothioate; note = sugar modification: 2'-O-methoxyethylribose
  modified_base 15: mod_base = m5c; mod_base = OTHER; note = sugar modification: 2'-O-methoxyethylribose; note = backbone modification: 5'-phosphorothioate
  modified_base 16: mod_base = OTHER; note = backbone modification: 5'-phosphorothioate; note = thymine; note = sugar modification: 2'-O-methoxyethylribose
  modified_base 17: mod_base = OTHER; note = backbone modification: 5'-phosphorothioate; note = sugar modification: lna
  modified_base 18: mod_base = OTHER; note = sugar modification: lna
tcatcccactgattctga

SEQ ID NO: 402 - RNA, 18 nt, synthetic construct
  source 1..18: mol_type = other RNA; note = Antisense oligonucleotide
  modified_base 1: mod_base = OTHER; note = sugar modification: lna; note = backbone modification: 5'-phosphorothioate; note = thymine
  modified_base 2: mod_base = OTHER; note = backbone modification: 5'-phosphorothioate; note = sugar modification: lna; note = thymine
  modified_base 3: mod_base = m5c; mod_base = OTHER; note = backbone modification: 5'-phosphorothioate; note = sugar modification: 2'-O-methoxyethylribose
  modified_base 4: mod_base = OTHER; note = sugar modification: 2'-O-methoxyethylribose; note = backbone modification: 5'-phosphorothioate
  modified_base 5: mod_base = OTHER; note = sugar modification: 2'-O-methoxyethylribose; note = backbone modification: 5'-phosphorothioate; note = thymine
  modified_base 6: mod_base = OTHER; mod_base = m5c; note = sugar modification: 2'-O-methoxyethylribose; note = backbone modification: 5'-phosphorothioate
  modified_base 7: mod_base = OTHER; mod_base = m5c; note = sugar modification: 2'-O-methoxyethylribose; note = backbone modification: 5'-phosphorothioate
  modified_base 8: mod_base = OTHER; mod_base = m5c; note = sugar modification: 2'-O-methoxyethylribose; note = backbone modification: 5'-phosphorothioate
  modified_base 9: mod_base = OTHER; note = backbone modification: 5'-phosphorothioate; note = sugar modification: 2'-O-methoxyethylribose
  modified_base 10: mod_base = m5c; mod_base = OTHER; note = backbone modification: 5'-phosphorothioate; note = sugar modification: 2'-O-methoxyethylribose
  modified_base 11: mod_base = OTHER; note = thymine; note = sugar modification: 2'-O-methoxyethylribose; note = backbone modification: 5'-phosphorothioate
  modified_base 12: mod_base = OTHER; note = backbone modification: 5'-phosphorothioate; note = sugar modification: 2'-O-methoxyethylribose
  modified_base 13: mod_base = OTHER; note = sugar modification: 2'-O-methoxyethylribose; note = backbone modification: 5'-phosphorothioate
  modified_base 14: mod_base = OTHER; note = sugar modification: 2'-O-methoxyethylribose; note = thymine; note = backbone modification: 5'-phosphorothioate
  modified_base 15: mod_base = OTHER; note = sugar modification: 2'-O-methoxyethylribose; note = thymine; note = backbone modification: 5'-phosphorothioate
  modified_base 16: mod_base = m5c; mod_base = OTHER; note = backbone modification: 5'-phosphorothioate; note = sugar modification: 2'-O-methoxyethylribose
  modified_base 17: mod_base = OTHER; note = sugar modification: lna; note = thymine; note = backbone modification: 5'-phosphorothioate
  modified_base 18: mod_base = OTHER; note = sugar modification: lna
ttcatcccactgattctg

SEQ ID NO: 403 - RNA, 18 nt, synthetic construct
  source 1..18: mol_type = other RNA; note = Antisense oligonucleotide
  modified_base 1: mod_base = OTHER; mod_base = m5c; note = backbone modification: 5'-phosphorothioate; note = sugar modification: lna
  modified_base 2: mod_base = OTHER; note = thymine; note = sugar modification: lna; note = backbone modification: 5'-phosphorothioate
  modified_base 3: mod_base = OTHER; note = sugar modification: 2'-O-methoxyethylribose; note = backbone modification: 5'-phosphorothioate; note = thymine
  modified_base 4: mod_base = OTHER; mod_base = m5c; note = backbone modification: 5'-phosphorothioate; note = sugar modification: 2'-O-methoxyethylribose
  modified_base 5: mod_base = OTHER; note = sugar modification: 2'-O-methoxyethylribose; note = backbone modification: 5'-phosphorothioate
  modified_base 6: mod_base = OTHER; note = backbone modification: 5'-phosphorothioate; note = thymine; note = sugar modification: 2'-O-methoxyethylribose
  modified_base 7: mod_base = m5c; mod_base = OTHER; note = sugar modification: 2'-O-methoxyethylribose; note = backbone modification: 5'-phosphorothioate
  modified_base 8: mod_base = m5c; mod_base = OTHER; note = sugar modification: 2'-O-methoxyethylribose; note = backbone modification: 5'-phosphorothioate
  modified_base 9: mod_base = OTHER; mod_base = m5c; note = sugar modification: 2'-O-methoxyethylribose; note = backbone modification: 5'-phosphorothioate
  modified_base 10: mod_base = OTHER; note = backbone modification: 5'-phosphorothioate; note = sugar modification: 2'-O-methoxyethylribose
  modified_base 11: mod_base = m5c; mod_base = OTHER; note = sugar modification: 2'-O-methoxyethylribose; note = backbone modification: 5'-phosphorothioate
  modified_base 12: mod_base = OTHER; note = backbone modification: 5'-phosphorothioate; note = thymine; note = sugar modification: 2'-O-methoxyethylribose
  modified_base 13: mod_base = OTHER; note = sugar modification: 2'-O-methoxyethylribose; note = backbone modification: 5'-phosphorothioate
  modified_base 14: mod_base = OTHER; note = backbone modification: 5'-phosphorothioate; note = sugar modification: 2'-O-methoxyethylribose
  modified_base 15: mod_base = OTHER; note = thymine; note = backbone modification: 5'-phosphorothioate; note = sugar modification: 2'-O-methoxyethylribose
  modified_base 16: mod_base = OTHER; note = backbone modification: 5'-phosphorothioate; note = sugar modification: 2'-O-methoxyethylribose; note = thymine
  modified_base 17: mod_base = OTHER; mod_base = m5c; note = sugar modification: lna; note = backbone modification: 5'-phosphorothioate
  modified_base 18: mod_base = OTHER; note = thymine; note = sugar modification: lna
cttcatcccactgattct

SEQ ID NO: 404 - RNA, 18 nt, synthetic construct
  source 1..18: mol_type = other RNA; note = Antisense oligonucleotide
  modified_base 1: mod_base = OTHER; note = sugar modification: lna; note = backbone modification: 5'-phosphorothioate
  modified_base 2: mod_base = OTHER; mod_base = m5c; note = sugar modification: lna; note = backbone modification: 5'-phosphorothioate
  modified_base 3: mod_base = OTHER; note = sugar modification: 2'-O-methoxyethylribose; note = backbone modification: 5'-phosphorothioate; note = thymine
  modified_base 4: mod_base = OTHER; note = sugar modification: 2'-O-methoxyethylribose; note = backbone modification: 5'-phosphorothioate; note = thymine
  modified_base 5: mod_base = m5c; mod_base = OTHER; note = sugar modification: 2'-O-methoxyethylribose; note = backbone modification: 5'-phosphorothioate
  modified_base 6: mod_base = OTHER; note = backbone modification: 5'-phosphorothioate; note = sugar modification: 2'-O-methoxyethylribose
  modified_base 7: mod_base = OTHER; note = thymine; note = sugar modification: 2'-O-methoxyethylribose; note = backbone modification: 5'-phosphorothioate
  modified_base 8: mod_base = m5c; mod_base = OTHER; note = backbone modification: 5'-phosphorothioate; note = sugar modification: 2'-O-methoxyethylribose
  modified_base 9: mod_base = m5c; mod_base = OTHER; note = backbone modification: 5'-phosphorothioate; note = sugar modification: 2'-O-methoxyethylribose
  modified_base 10: mod_base = OTHER; mod_base = m5c; note = backbone modification: 5'-phosphorothioate; note = sugar modification: 2'-O-methoxyethylribose
  modified_base 11: mod_base = OTHER; note = backbone modification: 5'-phosphorothioate; note = sugar modification: 2'-O-methoxyethylribose
  modified_base 12: mod_base = OTHER; mod_base = m5c; note = sugar modification: 2'-O-methoxyethylribose; note = backbone modification: 5'-phosphorothioate
  modified_base 13: mod_base = OTHER; note = backbone modification: 5'-phosphorothioate; note = sugar modification: 2'-O-methoxyethylribose; note = thymine
  modified_base 14: mod_base = OTHER; note = sugar modification: 2'-O-methoxyethylribose; note = backbone modification: 5'-phosphorothioate
  modified_base 15: mod_base = OTHER; note = backbone modification: 5'-phosphorothioate; note = sugar modification: 2'-O-methoxyethylribose
  modified_base 16: mod_base = OTHER; note = backbone modification: 5'-phosphorothioate; note = sugar modification: 2'-O-methoxyethylribose; note = thymine
  modified_base 17: mod_base = OTHER; note = thymine; note = backbone modification: 5'-phosphorothioate; note = sugar modification: lna
  modified_base 18: mod_base = OTHER; mod_base = m5c; note = sugar modification: lna
acttcatcccactgattc

SEQ ID NO: 405 - RNA, 18 nt, synthetic construct
  source 1..18: mol_type = other RNA; note = Antisense oligonucleotide
  modified_base 1: mod_base = OTHER; note = sugar modification: lna; note = backbone modification: 5'-phosphorothioate; note = thymine
  modified_base 2: mod_base = OTHER; note = sugar modification: lna; note = backbone modification: 5'-phosphorothioate
  modified_base 3: mod_base = OTHER; mod_base = m5c; note = sugar modification: 2'-O-methoxyethylribose; note = backbone modification: 5'-phosphorothioate
  modified_base 4: mod_base = OTHER; note = backbone modification: 5'-phosphorothioate; note = thymine; note = sugar modification: 2'-O-methoxyethylribose
  modified_base 5: mod_base = OTHER; note = backbone modification: 5'-phosphorothioate; note = sugar modification: 2'-O-methoxyethylribose; note = thymine
  modified_base 6: mod_base = OTHER; mod_base = m5c; note = sugar modification: 2'-O-methoxyethylribose; note = backbone modification: 5'-phosphorothioate
  modified_base 7: mod_base = OTHER; note = sugar modification: 2'-O-methoxyethylribose; note = backbone modification: 5'-phosphorothioate
  modified_base 8: mod_base = OTHER; note = sugar modification: 2'-O-methoxyethylribose; note = backbone modification: 5'-phosphorothioate; note = thymine
  modified_base 9: mod_base = OTHER; mod_base = m5c; note = backbone modification: 5'-phosphorothioate; note = sugar modification: 2'-O-methoxyethylribose
  modified_base 10: mod_base = OTHER; mod_base = m5c; note = sugar modification: 2'-O-methoxyethylribose; note = backbone modification: 5'-phosphorothioate
  modified_base 11: mod_base = OTHER; mod_base = m5c; note = sugar modification: 2'-O-methoxyethylribose; note = backbone modification: 5'-phosphorothioate
  modified_base 12: mod_base = OTHER; note = sugar modification: 2'-O-methoxyethylribose; note = backbone modification: 5'-phosphorothioate
  modified_base 13: mod_base = OTHER; mod_base = m5c; note = backbone modification: 5'-phosphorothioate; note = sugar modification: 2'-O-methoxyethylribose
  modified_base 14: mod_base = OTHER; note = backbone modification: 5'-phosphorothioate; note = sugar modification: 2'-O-methoxyethylribose; note = thymine
  modified_base 15: mod_base = OTHER; note = sugar modification: 2'-O-methoxyethylribose; note = backbone modification: 5'-phosphorothioate
  modified_base 16: mod_base = OTHER; note = sugar modification: 2'-O-methoxyethylribose; note = backbone modification: 5'-phosphorothioate
  modified_base 17: mod_base = OTHER; note = sugar modification: lna; note = backbone modification: 5'-phosphorothioate; note = thymine
  modified_base 18: mod_base = OTHER; note = sugar modification: lna; note = thymine
tacttcatcccactgatt

SEQ ID NO: 406 - RNA, 18 nt, synthetic construct
  source 1..18: mol_type = other RNA; note = Antisense oligonucleotide
  modified_base 1: mod_base = OTHER; note = sugar modification: lna; note = backbone modification: 5'-phosphorothioate
  modified_base 2: mod_base = OTHER; note = thymine; note = backbone modification: 5'-phosphorothioate; note = sugar modification: lna
  modified_base 3: mod_base = OTHER; note = backbone modification: 5'-phosphorothioate; note = sugar modification: 2'-O-methoxyethylribose
  modified_base 4: mod_base = OTHER; mod_base = m5c; note = sugar modification: 2'-O-methoxyethylribose; note = backbone modification: 5'-phosphorothioate
  modified_base 5: mod_base = OTHER; note = sugar modification: 2'-O-methoxyethylribose; note = backbone modification: 5'-phosphorothioate; note = thymine
  modified_base 6: mod_base = OTHER; note = thymine; note = sugar modification: 2'-O-methoxyethylribose; note = backbone modification: 5'-phosphorothioate
  modified_base 7: mod_base = OTHER; mod_base = m5c; note = sugar modification: 2'-O-methoxyethylribose; note = backbone modification: 5'-phosphorothioate
  modified_base 8: mod_base = OTHER; note = backbone modification: 5'-phosphorothioate; note = sugar modification: 2'-O-methoxyethylribose
  modified_base 9: mod_base = OTHER; note = sugar modification: 2'-O-methoxyethylribose; note = backbone modification: 5'-phosphorothioate; note = thymine
  modified_base 10: mod_base = OTHER; mod_base = m5c; note = backbone modification: 5'-phosphorothioate; note = sugar modification: 2'-O-methoxyethylribose
  modified_base 11: mod_base = OTHER; mod_base = m5c; note = backbone modification: 5'-phosphorothioate; note = sugar modification: 2'-O-methoxyethylribose
  modified_base 12: mod_base = OTHER; mod_base = m5c; note = sugar modification: 2'-O-methoxyethylribose; note = backbone modification: 5'-phosphorothioate
  modified_base 13: mod_base = OTHER; note = sugar modification: 2'-O-methoxyethylribose; note = backbone modification: 5'-phosphorothioate
  modified_base 14: mod_base = m5c; mod_base = OTHER; note = sugar modification: 2'-O-methoxyethylribose; note = backbone modification: 5'-phosphorothioate
  modified_base 15: mod_base = OTHER; note = sugar modification: 2'-O-methoxyethylribose; note = backbone modification: 5'-phosphorothioate; note = thymine
  modified_base 16: mod_base = OTHER; note = sugar modification: 2'-O-methoxyethylribose; note = backbone modification: 5'-phosphorothioate
  modified_base 17: mod_base = OTHER; note = backbone modification: 5'-phosphorothioate; note = sugar modification: lna
  modified_base 18: mod_base = OTHER; note = thymine; note = sugar modification: lna
gtacttcatcccactgat

SEQ ID NO: 407 - RNA, 18 nt, synthetic construct
  source 1..18: mol_type = other RNA; note = Antisense oligonucleotide
  modified_base 1: mod_base = OTHER; note = thymine; note = sugar modification: lna; note = backbone modification: 5'-phosphorothioate
  modified_base 2: mod_base = OTHER; note = backbone modification: 5'-phosphorothioate; note = sugar modification: lna
  modified_base 3: mod_base = OTHER; note = sugar modification: 2'-O-methoxyethylribose; note = thymine; note = backbone modification: 5'-phosphorothioate
  modified_base 4: mod_base = OTHER; note = backbone modification: 5'-phosphorothioate; note = sugar modification: 2'-O-methoxyethylribose
  modified_base 5: mod_base = OTHER; mod_base = m5c; note = backbone modification: 5'-phosphorothioate; note = sugar modification: 2'-O-methoxyethylribose
  modified_base 6: mod_base = OTHER; note = thymine; note = sugar modification: 2'-O-methoxyethylribose; note = backbone modification: 5'-phosphorothioate
  modified_base 7: mod_base = OTHER; note = sugar modification: 2'-O-methoxyethylribose; note = thymine; note = backbone modification: 5'-phosphorothioate
  modified_base 8: mod_base = m5c; mod_base = OTHER; note = sugar modification: 2'-O-methoxyethylribose; note = backbone modification: 5'-phosphorothioate
  modified_base 9: mod_base = OTHER; note = sugar modification: 2'-O-methoxyethylribose; note = backbone modification: 5'-phosphorothioate
  modified_base 10: mod_base = OTHER; note = thymine; note = sugar modification: 2'-O-methoxyethylribose; note = backbone modification: 5'-phosphorothioate
  modified_base 11: mod_base = m5c; mod_base = OTHER; note = backbone modification: 5'-phosphorothioate; note = sugar modification: 2'-O-methoxyethylribose
  modified_base 12: mod_base = m5c; mod_base = OTHER; note = backbone modification: 5'-phosphorothioate; note = sugar modification: 2'-O-methoxyethylribose
  modified_base 13: mod_base = OTHER; mod_base = m5c; note = sugar modification: 2'-O-methoxyethylribose; note = backbone modification: 5'-phosphorothioate
  modified_base 14: mod_base = OTHER; note = backbone modification: 5'-phosphorothioate; note = sugar modification: 2'-O-methoxyethylribose
  modified_base 15: mod_base = m5c; mod_base = OTHER; note = sugar modification: 2'-O-methoxyethylribose; note = backbone modification: 5'-phosphorothioate
  modified_base 16: mod_base = OTHER; note = backbone modification: 5'-phosphorothioate; note = sugar modification: 2'-O-methoxyethylribose; note = thymine
  modified_base 17: mod_base = OTHER; note = backbone modification: 5'-phosphorothioate; note = sugar modification: lna
  modified_base 18: mod_base = OTHER; note = sugar modification: lna
tgtacttcatcccactga

SEQ ID NO: 408 - RNA, 18 nt, synthetic construct
  source 1..18: mol_type = other RNA; note = Antisense oligonucleotide
  modified_base 1: mod_base = OTHER; note = thymine; note = backbone modification: 5'-phosphorothioate; note = sugar modification: lna
  modified_base 2: mod_base = OTHER; note = backbone modification: 5'-phosphorothioate; note = sugar modification: lna; note = thymine
  modified_base 3: mod_base = OTHER; note = backbone modification: 5'-phosphorothioate; note = sugar modification: 2'-O-methoxyethylribose
  modified_base 4: mod_base = OTHER; note = backbone modification: 5'-phosphorothioate; note = thymine; note = sugar modification: 2'-O-methoxyethylribose
  modified_base 5: mod_base = OTHER; note = backbone modification: 5'-phosphorothioate; note = sugar modification: 2'-O-methoxyethylribose
  modified_base 6: mod_base = OTHER; mod_base = m5c; note = backbone modification: 5'-phosphorothioate; note = sugar modification: 2'-O-methoxyethylribose
  modified_base 7: mod_base = OTHER; note = backbone modification: 5'-phosphorothioate; note = thymine; note = sugar modification: 2'-O-methoxyethylribose
  modified_base 8: mod_base = OTHER; note = sugar modification: 2'-O-methoxyethylribose; note = backbone modification: 5'-phosphorothioate; note = thymine
  modified_base 9: mod_base = OTHER; mod_base = m5c; note = backbone modification: 5'-phosphorothioate; note = sugar modification: 2'-O-methoxyethylribose
  modified_base 10: mod_base = OTHER; note = sugar modification: 2'-O-methoxyethylribose; note = backbone modification: 5'-phosphorothioate
  modified_base 11: mod_base = OTHER; note = sugar modification: 2'-O-methoxyethylribose; note = backbone modification: 5'-phosphorothioate; note = thymine
  modified_base 12: mod_base = OTHER; mod_base = m5c; note = backbone modification: 5'-phosphorothioate; note = sugar modification: 2'-O-methoxyethylribose
  modified_base 13: mod_base = OTHER; mod_base = m5c; note = sugar modification: 2'-O-methoxyethylribose; note = backbone modification: 5'-phosphorothioate
  modified_base 14: mod_base = OTHER; mod_base = m5c; note = backbone modification: 5'-phosphorothioate; note = sugar modification: 2'-O-methoxyethylribose
  modified_base 15: mod_base = OTHER; note = sugar modification: 2'-O-methoxyethylribose; note = backbone modification: 5'-phosphorothioate
  modified_base 16: mod_base = OTHER; mod_base = m5c; note = sugar modification: 2'-O-methoxyethylribose; note = backbone modification: 5'-phosphorothioate
  modified_base 17: mod_base = OTHER; note = thymine; note = backbone modification: 5'-phosphorothioate; note = sugar modification: lna
  modified_base 18: mod_base = OTHER; note = sugar modification: lna
ttgtacttcatcccactg

SEQ ID NO: 409 - RNA, 18 nt, synthetic construct
  source 1..18: mol_type = other RNA; note = Antisense oligonucleotide
  modified_base 1: mod_base = OTHER; mod_base = m5c; note = sugar modification: lna; note = backbone modification: 5'-phosphorothioate
  modified_base 2: mod_base = OTHER; note = thymine; note = sugar modification: lna; note = backbone modification: 5'-phosphorothioate
  modified_base 3: mod_base = OTHER; note = thymine; note = backbone modification: 5'-phosphorothioate; note = sugar modification: 2'-O-methoxyethylribose
  modified_base 4: mod_base = OTHER; note = backbone modification: 5'-phosphorothioate; note = sugar modification: 2'-O-methoxyethylribose
  modified_base 5: mod_base = OTHER; note = sugar modification: 2'-O-methoxyethylribose; note = backbone modification: 5'-phosphorothioate; note = thymine
  modified_base 6: mod_base = OTHER; note = sugar modification: 2'-O-methoxyethylribose; note = backbone modification: 5'-phosphorothioate
  modified_base 7: mod_base = m5c; mod_base = OTHER; note = sugar modification: 2'-O-methoxyethylribose; note = backbone modification: 5'-phosphorothioate
  modified_base 8: mod_base = OTHER; note = thymine; note = backbone modification: 5'-phosphorothioate; note = sugar modification: 2'-O-methoxyethylribose
  modified_base 9: mod_base = OTHER; note = thymine; note = backbone modification: 5'-phosphorothioate; note = sugar modification: 2'-O-methoxyethylribose
  modified_base 10: mod_base = m5c; mod_base = OTHER; note = backbone modification: 5'-phosphorothioate; note = sugar modification: 2'-O-methoxyethylribose
  modified_base 11: mod_base = OTHER; note = backbone modification: 5'-phosphorothioate; note = sugar modification: 2'-O-methoxyethylribose
  modified_base 12: mod_base = OTHER; note = backbone modification: 5'-phosphorothioate; note = thymine; note = sugar modification: 2'-O-methoxyethylribose
  modified_base 13: mod_base = OTHER; mod_base = m5c; note = backbone modification: 5'-phosphorothioate; note = sugar modification: 2'-O-methoxyethylribose
  modified_base 14: mod_base = m5c; mod_base = OTHER; note = backbone modification: 5'-phosphorothioate; note = sugar modification: 2'-O-methoxyethylribose
  modified_base 15: mod_base = m5c; mod_base = OTHER; note = backbone modification: 5'-phosphorothioate; note = sugar modification: 2'-O-methoxyethylribose
  modified_base 16: mod_base = OTHER; note = backbone modification: 5'-phosphorothioate; note = sugar modification: 2'-O-methoxyethylribose
  modified_base 17: mod_base = m5c; mod_base = OTHER; note = backbone modification: 5'-phosphorothioate; note = sugar modification: lna
  modified_base 18: mod_base = OTHER; note = thymine; note = sugar modification: lna
cttgtacttcatcccact

SEQ ID NO: 410 - RNA, 18 nt, synthetic construct
  source 1..18: mol_type = other RNA; note = Antisense oligonucleotide
  modified_base 1: mod_base = OTHER; note = thymine; note = sugar modification: lna; note = backbone modification: 5'-phosphorothioate
  modified_base 2: mod_base = OTHER; mod_base = m5c; note = backbone modification: 5'-phosphorothioate; note = sugar modification: lna
  modified_base 3: mod_base = OTHER; note = thymine; note = sugar modification: 2'-O-methoxyethylribose; note = backbone modification: 5'-phosphorothioate
  modified_base 4: mod_base = OTHER; note = backbone modification: 5'-phosphorothioate; note = thymine; note = sugar modification: 2'-O-methoxyethylribose
  modified_base 5: mod_base = OTHER; note = backbone modification: 5'-phosphorothioate; note = sugar modification: 2'-O-methoxyethylribose
  modified_base 6: mod_base = OTHER; note = backbone modification: 5'-phosphorothioate; note = sugar modification: 2'-O-methoxyethylribose; note = thymine
  modified_base 7: mod_base = OTHER; note = sugar modification: 2'-O-methoxyethylribose; note = backbone modification: 5'-phosphorothioate
  modified_base 8: mod_base = OTHER; mod_base = m5c; note = backbone modification: 5'-phosphorothioate; note = sugar modification: 2'-O-methoxyethylribose
  modified_base 9: mod_base = OTHER; note = thymine; note = sugar modification: 2'-O-methoxyethylribose; note = backbone modification: 5'-phosphorothioate
  modified_base 10: mod_base = OTHER; note = thymine; note = sugar modification: 2'-O-methoxyethylribose; note = backbone modification: 5'-phosphorothioate
  modified_base 11: mod_base = OTHER; mod_base = m5c; note = sugar modification: 2'-O-methoxyethylribose; note = backbone modification: 5'-phosphorothioate
  modified_base 12: mod_base = OTHER; note = sugar modification: 2'-O-methoxyethylribose; note = backbone modification: 5'-phosphorothioate
  modified_base 13: mod_base = OTHER; note = thymine; note = backbone modification: 5'-phosphorothioate; note = sugar modification: 2'-O-methoxyethylribose
  modified_base 14: mod_base = OTHER; mod_base = m5c; note = backbone modification: 5'-phosphorothioate; note = sugar modification: 2'-O-methoxyethylribose
  modified_base 15: mod_base = m5c; mod_base = OTHER; note = backbone modification: 5'-phosphorothioate; note = sugar modification: 2'-O-methoxyethylribose
  modified_base 16: mod_base = m5c; mod_base = OTHER; note = backbone modification: 5'-phosphorothioate; note = sugar modification: 2'-O-methoxyethylribose
  modified_base 17: mod_base = OTHER; note = sugar modification: lna; note = backbone modification: 5'-phosphorothioate
  modified_base 18: mod_base = m5c; mod_base = OTHER; note = sugar modification: lna
tcttgtacttcatcccac

SEQ ID NO: 411 - RNA, 18 nt, synthetic construct
  source 1..18: mol_type = other RNA; note = Antisense oligonucleotide
  modified_base 1: mod_base = OTHER; note = thymine; note = sugar modification: lna; note = backbone modification: 5'-phosphorothioate
  modified_base 2: mod_base = OTHER; note = sugar modification: lna; note = backbone modification: 5'-phosphorothioate; note = thymine
  modified_base 3: mod_base = OTHER; mod_base = m5c; note = sugar modification: 2'-O-methoxyethylribose; note = backbone modification: 5'-phosphorothioate
  modified_base 4: mod_base = OTHER; note = sugar modification: 2'-O-methoxyethylribose; note = backbone modification: 5'-phosphorothioate; note = thymine
  modified_base 5: mod_base = OTHER; note = thymine; note = backbone modification: 5'-phosphorothioate; note = sugar modification: 2'-O-methoxyethylribose
  modified_base 6: mod_base = OTHER; note = backbone modification: 5'-phosphorothioate; note = sugar modification: 2'-O-methoxyethylribose
  modified_base 7: mod_base = OTHER; note = thymine; note = sugar modification: 2'-O-methoxyethylribose; note = backbone modification: 5'-phosphorothioate
  modified_base 8: mod_base = OTHER; note = sugar modification: 2'-O-methoxyethylribose; note = backbone modification: 5'-phosphorothioate
  modified_base 9: mod_base = m5c; mod_base = OTHER; note = sugar modification: 2'-O-methoxyethylribose; note = backbone modification: 5'-phosphorothioate
  modified_base 10: mod_base = OTHER; note = sugar modification: 2'-O-methoxyethylribose; note = thymine; note = backbone modification: 5'-phosphorothioate
  modified_base 11: mod_base = OTHER; note = thymine; note = backbone modification: 5'-phosphorothioate; note = sugar modification: 2'-O-methoxyethylribose
  modified_base 12: mod_base = m5c; mod_base = OTHER; note = sugar modification: 2'-O-methoxyethylribose; note = backbone modification: 5'-phosphorothioate
  modified_base 13: mod_base = OTHER; note = sugar modification: 2'-O-methoxyethylribose; note = backbone modification: 5'-phosphorothioate
  modified_base 14: mod_base = OTHER; note = sugar modification: 2'-O-methoxyethylribose; note = thymine; note = backbone modification: 5'-phosphorothioate
  modified_base 15: mod_base = m5c; mod_base = OTHER; note = sugar modification: 2'-O-methoxyethylribose; note = backbone modification: 5'-phosphorothioate
  modified_base 16: mod_base = m5c; mod_base = OTHER; note = sugar modification: 2'-O-methoxyethylribose; note = backbone modification: 5'-phosphorothioate
  modified_base 17: mod_base = m5c; mod_base = OTHER; note = sugar modification: lna; note = backbone modification: 5'-phosphorothioate
  modified_base 18: mod_base = OTHER; note = sugar modification: lna
ttcttgtacttcatccca

SEQ ID NO: 412 - RNA, 18 nt, synthetic construct
  source 1..18: mol_type = other RNA; note = Antisense oligonucleotide
  modified_base 1: mod_base = OTHER; note = backbone modification: 5'-phosphorothioate; note = sugar modification: lna
  modified_base 2: mod_base = OTHER; note = sugar modification: lna; note = backbone modification: 5'-phosphorothioate; note = thymine
  modified_base 3: mod_base = OTHER; note = sugar modification: 2'-O-methoxyethylribose; note = thymine; note = backbone modification: 5'-phosphorothioate
  modified_base 4: mod_base = OTHER; mod_base = m5c; note = backbone modification: 5'-phosphorothioate; note = sugar modification: 2'-O-methoxyethylribose
  modified_base 5: mod_base = OTHER; note = thymine; note = backbone modification: 5'-phosphorothioate; note = sugar modification: 2'-O-methoxyethylribose
  modified_base 6: mod_base = OTHER; note = sugar modification: 2'-O-methoxyethylribose; note = thymine; note = backbone modification: 5'-phosphorothioate
  modified_base 7: mod_base = OTHER; note = sugar modification: 2'-O-methoxyethylribose; note = backbone modification: 5'-phosphorothioate
  modified_base 8: mod_base = OTHER; note = sugar modification: 2'-O-methoxyethylribose; note = backbone modification: 5'-phosphorothioate; note = thymine
  modified_base 9: mod_base = OTHER; note = backbone modification: 5'-phosphorothioate; note = sugar modification: 2'-O-methoxyethylribose
  modified_base 10: mod_base = m5c; mod_base = OTHER; note = sugar modification: 2'-O-methoxyethylribose; note = backbone modification: 5'-phosphorothioate
  modified_base 11: mod_base = OTHER; note = backbone modification: 5'-phosphorothioate; note = thymine; note = sugar modification: 2'-O-methoxyethylribose
  modified_base 12: mod_base = OTHER; note = sugar modification: 2'-O-methoxyethylribose; note = backbone modification: 5'-phosphorothioate; note = thymine
  modified_base 13: mod_base = OTHER; mod_base = m5c; note = sugar modification: 2'-O-methoxyethylribose; note = backbone modification: 5'-phosphorothioate
  modified_base 14: mod_base = OTHER; note = sugar modification: 2'-O-methoxyethylribose; note = backbone modification: 5'-phosphorothioate
  modified_base 15: mod_base = OTHER; note = sugar modification: 2'-O-methoxyethylribose; note = thymine; note = backbone modification: 5'-phosphorothioate
  modified_base 16: mod_base = OTHER; mod_base = m5c; note = backbone modification: 5'-phosphorothioate; note = sugar modification: 2'-O-methoxyethylribose
  modified_base 17: mod_base = m5c; mod_base = OTHER; note = sugar modification: lna; note = backbone modification: 5'-phosphorothioate
  modified_base 18: mod_base = OTHER; mod_base = m5c; note = sugar modification: lna
gttcttgtacttcatccc

SEQ ID NO: 413 - RNA, 18 nt, synthetic construct
  source 1..18: mol_type = other RNA; note = Antisense oligonucleotide
  modified_base 1: mod_base = OTHER; note = backbone modification: 5'-phosphorothioate; note = thymine; note = sugar modification: lna
  modified_base 2: mod_base = OTHER; note = sugar modification: lna; note = backbone modification: 5'-phosphorothioate
  modified_base 3: mod_base = OTHER; note = backbone modification: 5'-phosphorothioate; note = sugar modification: 2'-O-methoxyethylribose; note = thymine
  modified_base 4: mod_base = OTHER; note = backbone modification: 5'-phosphorothioate; note = sugar modification: 2'-O-methoxyethylribose; note = thymine
  modified_base 5: mod_base = OTHER; mod_base = m5c; note = sugar modification: 2'-O-methoxyethylribose; note = backbone modification: 5'-phosphorothioate
  modified_base 6: mod_base = OTHER; note = sugar modification: 2'-O-methoxyethylribose; note = thymine; note = backbone modification: 5'-phosphorothioate
  modified_base 7: mod_base = OTHER; note = thymine; note = backbone modification: 5'-phosphorothioate; note = sugar modification: 2'-O-methoxyethylribose
  modified_base 8: mod_base = OTHER; note = backbone modification: 5'-phosphorothioate; note = sugar modification: 2'-O-methoxyethylribose
  modified_base 9: mod_base = OTHER; note = thymine; note = sugar modification: 2'-O-methoxyethylribose; note = backbone modification: 5'-phosphorothioate
  modified_base 10: mod_base = OTHER; note = sugar modification: 2'-O-methoxyethylribose; note = backbone modification: 5'-phosphorothioate
  modified_base 11: mod_base = m5c; mod_base = OTHER; note = backbone modification: 5'-phosphorothioate; note = sugar modification: 2'-O-methoxyethylribose
  modified_base 12: mod_base = OTHER; note = thymine; note = backbone modification: 5'-phosphorothioate; note = sugar modification: 2'-O-methoxyethylribose
  modified_base 13: mod_base = OTHER; note = sugar modification: 2'-O-methoxyethylribose; note = backbone modification: 5'-phosphorothioate; note = thymine
  modified_base 14: mod_base = OTHER; mod_base = m5c; note = sugar modification: 2'-O-methoxyethylribose; note = backbone modification: 5'-phosphorothioate
  modified_base 15: mod_base = OTHER; note = backbone modification: 5'-phosphorothioate; note = sugar modification: 2'-O-methoxyethylribose
  modified_base 16: mod_base = OTHER; note = sugar modification: 2'-O-methoxyethylribose; note = thymine; note = backbone modification: 5'-phosphorothioate
  modified_base 17: mod_base = m5c; mod_base = OTHER; note = backbone modification: 5'-phosphorothioate; note = sugar modification: lna
  modified_base 18: mod_base = OTHER; mod_base = m5c; note = sugar modification: lna
tgttcttgtacttcatcc

SEQ ID NO: 414 - RNA, 18 nt, synthetic construct
  source 1..18: mol_type = other RNA; note = Antisense oligonucleotide
  modified_base 1: mod_base = OTHER; note = sugar modification: lna; note = backbone modification: 5'-phosphorothioate
  modified_base 2: mod_base = OTHER; note = sugar modification: lna; note = backbone modification: 5'-phosphorothioate; note = thymine
  modified_base 3: mod_base = OTHER; note = backbone modification: 5'-phosphorothioate; note = sugar modification: 2'-O-methoxyethylribose
  modified_base 4: mod_base = OTHER; note = backbone modification: 5'-phosphorothioate; note = thymine; note = sugar modification: 2'-O-methoxyethylribose
  modified_base 5: mod_base = OTHER; note = sugar modification: 2'-O-methoxyethylribose; note = thymine; note = backbone modification: 5'-phosphorothioate
  modified_base 6: mod_base = OTHER; mod_base = m5c; note = sugar modification: 2'-O-methoxyethylribose; note = backbone modification: 5'-phosphorothioate
  modified_base 7: mod_base = OTHER; note = sugar modification: 2'-O-methoxyethylribose; note = backbone modification: 5'-phosphorothioate; note = thymine
  modified_base 8: mod_base = OTHER; note = sugar modification: 2'-O-methoxyethylribose; note = thymine; note = backbone modification: 5'-phosphorothioate
  modified_base 9: mod_base = OTHER; note = backbone modification: 5'-phosphorothioate; note = sugar modification: 2'-O-methoxyethylribose
  modified_base 10: mod_base = OTHER; note = backbone modification: 5'-phosphorothioate; note = thymine; note = sugar modification: 2'-O-methoxyethylribose
  modified_base 11: mod_base = OTHER; note = sugar modification: 2'-O-methoxyethylribose; note = backbone modification: 5'-phosphorothioate
  modified_base 12: mod_base = OTHER; mod_base = m5c; note = backbone modification: 5'-phosphorothioate; note = sugar modification: 2'-O-methoxyethylribose
  modified_base 13: mod_base = OTHER; note = backbone modification: 5'-phosphorothioate; note = thymine; note = sugar modification: 2'-O-methoxyethylribose
  modified_base 14: mod_base = OTHER; note = backbone modification: 5'-phosphorothioate; note = sugar modification: 2'-O-methoxyethylribose; note = thymine
  modified_base 15: mod_base = m5c; mod_base = OTHER; note = sugar modification: 2'-O-methoxyethylribose; note = backbone modification: 5'-phosphorothioate
  modified_base 16: mod_base = OTHER; note = backbone modification: 5'-phosphorothioate; note = sugar modification: 2'-O-methoxyethylribose
  modified_base 17: mod_base = OTHER; note = sugar modification: lna; note = backbone modification: 5'-phosphorothioate; note = thymine
  modified_base 18: mod_base = m5c; mod_base = OTHER; note = sugar modification: lna
gtgttcttgtacttcatc

SEQ ID NO: 415 - RNA, 18 nt, synthetic construct
  source 1..18: mol_type = other RNA; note = Antisense oligonucleotide
  modified_base 1: mod_base = OTHER; note = backbone modification: 5'-phosphorothioate; note = sugar modification: lna
  modified_base 2: mod_base = OTHER; note = backbone modification: 5'-phosphorothioate; note = sugar modification: lna
  modified_base 3: mod_base = OTHER; note = backbone modification: 5'-phosphorothioate; note = sugar modification: 2'-O-methoxyethylribose; note = thymine
  modified_base 4: mod_base = OTHER; note = backbone modification: 5'-phosphorothioate; note = sugar modification: 2'-O-methoxyethylribose
  modified_base 5: mod_base = OTHER; note = backbone modification: 5'-phosphorothioate; note = sugar modification: 2'-O-methoxyethylribose; note = thymine
  modified_base 6: mod_base = OTHER; note = sugar modification: 2'-O-methoxyethylribose; note = thymine; note = backbone modification: 5'-phosphorothioate
  modified_base 7: mod_base = m5c; mod_base = OTHER; note = sugar modification: 2'-O-methoxyethylribose; note = backbone modification: 5'-phosphorothioate
  modified_base 8: mod_base = OTHER; note = thymine; note = backbone modification: 5'-phosphorothioate; note = sugar modification: 2'-O-methoxyethylribose
  modified_base 9: mod_base = OTHER; note = thymine; note = backbone modification: 5'-phosphorothioate; note = sugar modification: 2'-O-methoxyethylribose
  modified_base 10: mod_base = OTHER; note = backbone modification: 5'-phosphorothioate; note = sugar modification: 2'-O-methoxyethylribose
  modified_base 11: mod_base = OTHER; note = thymine; note = backbone modification: 5'-phosphorothioate; note = sugar modification: 2'-O-methoxyethylribose
  modified_base 12: mod_base = OTHER; note = sugar modification: 2'-O-methoxyethylribose; note = backbone modification: 5'-phosphorothioate
  modified_base 13: mod_base = m5c; mod_base = OTHER; note = sugar modification: 2'-O-methoxyethylribose; note = backbone modification: 5'-phosphorothioate
  modified_base 14: mod_base = OTHER; note = sugar modification: 2'-O-methoxyethylribose; note = backbone modification: 5'-phosphorothioate; note = thymine
  modified_base 15: mod_base = OTHER; note = thymine; note = sugar modification: 2'-O-methoxyethylribose; note = backbone modification: 5'-phosphorothioate
  modified_base 16: mod_base = m5c; mod_base = OTHER; note = backbone modification: 5'-phosphorothioate; note = sugar modification: 2'-O-methoxyethylribose
  modified_base 17: mod_base = OTHER; note = sugar modification: lna; note = backbone modification: 5'-phosphorothioate
  modified_base 18: mod_base = OTHER; note = sugar modification: lna; note = thymine
ggtgttcttgtacttcat

SEQ ID NO: 416 - RNA, 18 nt, synthetic construct
  source 1..18: mol_type = other RNA; note = Antisense oligonucleotide
  modified_base 1: mod_base = OTHER; note = backbone modification: 5'-phosphorothioate; note = sugar modification: lna
  modified_base 2: mod_base = OTHER; note = backbone modification: 5'-phosphorothioate; note = sugar modification: lna
  modified_base 3: mod_base = OTHER; note = backbone modification: 5'-phosphorothioate; note = sugar modification: 2'-O-methoxyethylribose
  modified_base 4: mod_base = OTHER; note = sugar modification: 2'-O-methoxyethylribose; note = thymine; note = backbone modification: 5'-phosphorothioate
  modified_base 5: mod_base = OTHER; note = backbone modification: 5'-phosphorothioate; note = sugar modification: 2'-O-methoxyethylribose
  modified_base 6: mod_base = OTHER; note = sugar modification: 2'-O-methoxyethylribose; note = thymine; note = backbone modification: 5'-phosphorothioate
  modified_base 7: mod_base = OTHER; note = backbone modification: 5'-phosphorothioate; note = sugar modification: 2'-O-methoxyethylribose; note = thymine
  modified_base 8: mod_base = OTHER; mod_base = m5c; note = backbone modification: 5'-phosphorothioate; note = sugar modification: 2'-O-methoxyethylribose
  modified_base 9: mod_base = OTHER; note = backbone modification: 5'-phosphorothioate; note = thymine; note = sugar modification: 2'-O-methoxyethylribose
  modified_base 10: mod_base = OTHER; note = thymine; note = backbone modification: 5'-phosphorothioate; note = sugar modification: 2'-O-methoxyethylribose
  modified_base 11: mod_base = OTHER; note = backbone modification: 5'-phosphorothioate; note = sugar modification: 2'-O-methoxyethylribose
  modified_base 12: mod_base = OTHER; note = thymine; note = backbone modification: 5'-phosphorothioate; note = sugar modification: 2'-O-methoxyethylribose
  modified_base 13: mod_base = OTHER; note = backbone modification: 5'-phosphorothioate; note = sugar modification: 2'-O-methoxyethylribose
  modified_base 14: mod_base = OTHER; mod_base = m5c; note = sugar modification: 2'-O-methoxyethylribose; note = backbone modification: 5'-phosphorothioate
  modified_base 15: mod_base = OTHER; note = thymine; note = backbone modification: 5'-phosphorothioate; note = sugar modification: 2'-O-methoxyethylribose
  modified_base 16: mod_base = OTHER; note = backbone modification: 5'-phosphorothioate; note = thymine; note = sugar modification: 2'-O-methoxyethylribose
  modified_base 17: mod_base = m5c; mod_base = OTHER; note = backbone modification: 5'-phosphorothioate; note = sugar modification: lna
  modified_base 18: mod_base = OTHER; note = sugar modification: lna
aggtgttcttgtacttca

SEQ ID NO: 417 - RNA, 18 nt, synthetic construct
  source 1..18: mol_type = other RNA; note = Antisense oligonucleotide
  modified_base 1: mod_base = OTHER; note = backbone modification: 5'-phosphorothioate; note = sugar modification: lna
  modified_base 2: mod_base = OTHER; note = sugar modification: lna; note = backbone modification: 5'-phosphorothioate
  modified_base 3: mod_base = OTHER; note = sugar modification: 2'-O-methoxyethylribose; note = backbone modification: 5'-phosphorothioate
  modified_base 4: mod_base = OTHER; note = sugar modification: 2'-O-methoxyethylribose; note = backbone modification: 5'-phosphorothioate
  modified_base 5: mod_base = OTHER; note = sugar modification: 2'-O-methoxyethylribose; note = backbone modification: 5'-phosphorothioate; note = thymine
  modified_base 6: mod_base = OTHER; note = backbone modification: 5'-phosphorothioate; note = sugar modification: 2'-O-methoxyethylribose
  modified_base 7: mod_base = OTHER; note = sugar modification: 2'-O-methoxyethylribose; note = backbone modification: 5'-phosphorothioate; note = thymine
  modified_base 8: mod_base = OTHER; note = backbone modification: 5'-phosphorothioate; note = sugar modification: 2'-O-methoxyethylribose; note = thymine
  modified_base 9: mod_base = OTHER; mod_base = m5c; note = sugar modification: 2'-O-methoxyethylribose; note = backbone modification: 5'-phosphorothioate
  modified_base 10: mod_base = OTHER; note = thymine; note = sugar modification: 2'-O-methoxyethylribose; note = backbone modification: 5'-phosphorothioate
  modified_base 11: mod_base = OTHER; note = thymine; note = backbone modification: 5'-phosphorothioate; note = sugar modification: 2'-O-methoxyethylribose
  modified_base 12: mod_base = OTHER; note = backbone modification: 5'-phosphorothioate; note = sugar modification: 2'-O-methoxyethylribose
  modified_base 13: mod_base = OTHER; note = sugar modification: 2'-O-methoxyethylribose; note = backbone modification: 5'-phosphorothioate; note = thymine
  modified_base 14: mod_base = OTHER; note = backbone modification: 5'-phosphorothioate; note = sugar modification: 2'-O-methoxyethylribose
  modified_base 15: mod_base = m5c; mod_base = OTHER; note = sugar modification: 2'-O-methoxyethylribose; note = backbone modification: 5'-phosphorothioate
  modified_base 16: mod_base = OTHER; note = sugar modification: 2'-O-methoxyethylribose; note = thymine; note = backbone modification: 5'-phosphorothioate
  modified_base 17: mod_base = OTHER; note = backbone modification: 5'-phosphorothioate; note = sugar modification: lna; note = thymine
  modified_base 18: mod_base = m5c; mod_base = OTHER; note = sugar modification: lna
aaggtgttcttgtacttc

SEQ ID NO: 418 - RNA, 18 nt, synthetic construct
  source 1..18: mol_type = other RNA; note = Antisense oligonucleotide
  modified_base 1: mod_base = OTHER; note = backbone modification: 5'-phosphorothioate; note = sugar modification: lna
  modified_base 2: mod_base = OTHER; note = backbone modification: 5'-phosphorothioate; note = sugar modification: lna
  modified_base 3: mod_base = OTHER; note = backbone modification: 5'-phosphorothioate; note = sugar modification: 2'-O-methoxyethylribose
  modified_base 4: mod_base = OTHER; note = sugar modification: 2'-O-methoxyethylribose; note = backbone modification: 5'-phosphorothioate
  modified_base 5: mod_base = OTHER; note = sugar modification: 2'-O-methoxyethylribose; note = backbone modification: 5'-phosphorothioate
  modified_base 6: mod_base = OTHER; note = thymine; note = backbone modification: 5'-phosphorothioate; note = sugar modification: 2'-O-methoxyethylribose
  modified_base 7: mod_base = OTHER; note = backbone modification: 5'-phosphorothioate; note = sugar modification: 2'-O-methoxyethylribose
  modified_base 8: mod_base = OTHER; note = thymine; note = sugar modification: 2'-O-methoxyethylribose; note = backbone modification: 5'-phosphorothioate
  modified_base 9: mod_base = OTHER; note = thymine; note = backbone modification: 5'-phosphorothioate; note = sugar modification: 2'-O-methoxyethylribose
  modified_base 10: mod_base = OTHER; mod_base = m5c; note = backbone modification: 5'-phosphorothioate; note = sugar modification: 2'-O-methoxyethylribose
  modified_base 11: mod_base = OTHER; note = backbone modification: 5'-phosphorothioate; note = sugar modification: 2'-O-methoxyethylribose; note = thymine
  modified_base 12: mod_base = OTHER; note = sugar modification: 2'-O-methoxyethylribose; note = backbone modification: 5'-phosphorothioate; note = thymine
  modified_base 13: mod_base = OTHER; note = sugar modification: 2'-O-methoxyethylribose; note = backbone modification: 5'-phosphorothioate
  modified_base 14: mod_base = OTHER; note = backbone modification: 5'-phosphorothioate; note = thymine; note = sugar modification: 2'-O-methoxyethylribose
  modified_base 15: mod_base = OTHER; note = backbone modification: 5'-phosphorothioate; note = sugar modification: 2'-O-methoxyethylribose
  modified_base 16: mod_base = m5c; mod_base = OTHER; note = sugar modification: 2'-O-methoxyethylribose; note = backbone modification: 5'-phosphorothioate
  modified_base 17: mod_base = OTHER; note = backbone modification: 5'-phosphorothioate; note = sugar modification: lna; note = thymine
  modified_base 18: mod_base = OTHER; note = thymine; note = sugar modification: lna
gaaggtgttcttgtactt

SEQ ID NO: 419 - RNA, 18 nt, synthetic construct
  source 1..18: mol_type = other RNA; note = Antisense oligonucleotide
  modified_base 1: mod_base = OTHER; note = sugar modification: lna; note = thymine; note = backbone modification: 5'-phosphorothioate
  modified_base 2: mod_base = OTHER; note = sugar modification: lna; note = backbone modification: 5'-phosphorothioate
  modified_base 3: mod_base = OTHER; note = backbone modification: 5'-phosphorothioate; note = sugar modification: 2'-O-methoxyethylribose
  modified_base 4: mod_base = OTHER; note = backbone modification: 5'-phosphorothioate; note = sugar modification: 2'-O-methoxyethylribose
  modified_base 5: mod_base = OTHER; note = sugar modification: 2'-O-methoxyethylribose; note = backbone modification: 5'-phosphorothioate
  modified_base 6: mod_base = OTHER; note = sugar modification: 2'-O-methoxyethylribose; note = backbone modification: 5'-phosphorothioate
  modified_base 7: mod_base = OTHER; note = thymine; note = sugar modification: 2'-O-methoxyethylribose; note = backbone modification: 5'-phosphorothioate
  modified_base 8: mod_base = OTHER; note = backbone modification: 5'-phosphorothioate; note = sugar modification: 2'-O-methoxyethylribose
  modified_base 9: mod_base = OTHER; note = sugar modification: 2'-O-methoxyethylribose; note = thymine; note = backbone modification: 5'-phosphorothioate
  modified_base 10: mod_base = OTHER; note = backbone modification: 5'-phosphorothioate; note = sugar modification: 2'-O-methoxyethylribose; note = thymine
  modified_base 11: mod_base = OTHER; mod_base = m5c; note = backbone modification: 5'-phosphorothioate; note = sugar modification: 2'-O-methoxyethylribose
  modified_base 12: mod_base = OTHER; note = backbone modification: 5'-phosphorothioate; note = thymine; note = sugar modification: 2'-O-methoxyethylribose
  modified_base 13: mod_base = OTHER; note = sugar modification: 2'-O-methoxyethylribose; note = backbone modification: 5'-phosphorothioate; note = thymine
  modified_base 14: mod_base = OTHER; note = sugar modification: 2'-O-methoxyethylribose; note = backbone modification: 5'-phosphorothioate
  modified_base 15: mod_base = OTHER; note = backbone modification: 5'-phosphorothioate; note = sugar modification: 2'-O-methoxyethylribose; note = thymine
  modified_base 16: mod_base = OTHER; note = sugar modification: 2'-O-methoxyethylribose; note = backbone modification: 5'-phosphorothioate
  modified_base 17: mod_base = OTHER; mod_base = m5c; note = backbone modification: 5'-phosphorothioate; note = sugar modification: lna
  modified_base 18: mod_base = OTHER; note = sugar modification: lna; note = thymine
tgaaggtgttcttgtact

SEQ ID NO: 420 - RNA, 18 nt, synthetic construct
  source 1..18: mol_type = other RNA; note = Antisense oligonucleotide
  modified_base 1: mod_base = m5c; mod_base = OTHER; note = sugar modification: lna; note = backbone modification: 5'-phosphorothioate
  modified_base 2: mod_base = OTHER; note = thymine; note = sugar modification: lna; note = backbone modification: 5'-phosphorothioate
  modified_base 3: mod_base = OTHER; note = sugar modification: 2'-O-methoxyethylribose; note = backbone modification: 5'-phosphorothioate
  modified_base 4: mod_base = OTHER; note = backbone modification: 5'-phosphorothioate; note = sugar modification: 2'-O-methoxyethylribose
  modified_base 5: mod_base = OTHER; note = backbone modification: 5'-phosphorothioate; note = sugar modification: 2'-O-methoxyethylribose
  modified_base 6: mod_base = OTHER; note = sugar modification: 2'-O-methoxyethylribose; note = backbone modification: 5'-phosphorothioate
  modified_base 7: mod_base = OTHER; note = backbone modification: 5'-phosphorothioate; note = sugar modification: 2'-O-methoxyethylribose
  modified_base 8: mod_base = OTHER; note = backbone modification: 5'-phosphorothioate; note = thymine; note = sugar modification: 2'-O-methoxyethylribose
  modified_base 9: mod_base = OTHER; note = sugar modification: 2'-O-methoxyethylribose; note = backbone modification: 5'-phosphorothioate
  modified_base 10: mod_base = OTHER; note = backbone modification: 5'-phosphorothioate; note = sugar modification: 2'-O-methoxyethylribose; note = thymine
  modified_base 11: mod_base = OTHER; note = thymine; note = sugar modification: 2'-O-methoxyethylribose; note = backbone modification: 5'-phosphorothioate
  modified_base 12: mod_base = OTHER; mod_base = m5c; note = backbone modification: 5'-phosphorothioate; note = sugar modification: 2'-O-methoxyethylribose
  modified_base 13: mod_base = OTHER; note = backbone modification: 5'-phosphorothioate; note = thymine; note = sugar modification: 2'-O-methoxyethylribose
  modified_base 14: mod_base = OTHER; note = thymine; note = backbone modification: 5'-phosphorothioate; note = sugar modification: 2'-O-methoxyethylribose
  modified_base 15: mod_base = OTHER; note = backbone modification: 5'-phosphorothioate; note = sugar modification: 2'-O-methoxyethylribose
  modified_base 16: mod_base = OTHER; note = sugar modification: 2'-O-methoxyethylribose; note = thymine; note = backbone modification: 5'-phosphorothioate
  modified_base 17: mod_base = OTHER; note = sugar modification: lna; note = backbone modification: 5'-phosphorothioate
  modified_base 18: mod_base = OTHER; mod_base = m5c; note = sugar modification: lna
ctgaaggtgttcttgtac

SEQ ID NO: 421 - RNA, 18 nt, synthetic construct
  source 1..18: mol_type = other RNA; note = Antisense oligonucleotide
  modified_base 1: mod_base = OTHER; note = thymine; note = backbone modification: 5'-phosphorothioate; note = sugar modification: lna
  modified_base 2: mod_base = m5c; mod_base = OTHER; note = backbone modification: 5'-phosphorothioate; note = sugar modification: lna
  modified_base 3: mod_base = OTHER; note = backbone modification: 5'-phosphorothioate; note = sugar modification: 2'-O-methoxyethylribose; note = thymine
  modified_base 4: mod_base = OTHER; note = backbone modification: 5'-phosphorothioate; note = sugar modification: 2'-O-methoxyethylribose
  modified_base 5: mod_base = OTHER; note = sugar modification: 2'-O-methoxyethylribose; note = backbone modification: 5'-phosphorothioate
  modified_base 6: mod_base = OTHER; note = backbone modification: 5'-phosphorothioate; note = sugar modification: 2'-O-methoxyethylribose
  modified_base 7: mod_base = OTHER; note = backbone modification: 5'-phosphorothioate; note = sugar modification: 2'-O-methoxyethylribose
  modified_base 8: mod_base = OTHER; note = sugar modification: 2'-O-methoxyethylribose; note = backbone modification: 5'-phosphorothioate
  modified_base 9: mod_base = OTHER; note = thymine; note = sugar modification: 2'-O-methoxyethylribose; note = backbone modification: 5'-phosphorothioate
  modified_base 10: mod_base = OTHER; note = backbone modification: 5'-phosphorothioate; note = sugar modification: 2'-O-methoxyethylribose
  modified_base 11: mod_base = OTHER; note = sugar modification: 2'-O-methoxyethylribose; note = thymine; note = backbone modification: 5'-phosphorothioate
  modified_base 12: mod_base = OTHER; note = thymine; note = sugar modification: 2'-O-methoxyethylribose; note = backbone modification: 5'-phosphorothioate
  modified_base 13: mod_base = OTHER; mod_base = m5c; note = sugar modification: 2'-O-methoxyethylribose; note = backbone modification: 5'-phosphorothioate
  modified_base 14: mod_base = OTHER; note = sugar modification: 2'-O-methoxyethylribose; note = backbone modification: 5'-phosphorothioate; note = thymine
  modified_base 15: mod_base = OTHER; note = sugar modification: 2'-O-methoxyethylribose; note = thymine; note = backbone modification: 5'-phosphorothioate
  modified_base 16: mod_base = OTHER; note = backbone modification: 5'-phosphorothioate; note = sugar modification: 2'-O-methoxyethylribose
  modified_base 17: mod_base = OTHER; note = sugar modification: lna; note = thymine; note = backbone modification: 5'-phosphorothioate
  modified_base 18: mod_base = OTHER; note = sugar modification: lna
tctgaaggtgttcttgta

SEQ ID NO: 422 - RNA, 18 nt, synthetic construct
  source 1..18: mol_type = other RNA; note = Antisense oligonucleotide
  modified_base 1: mod_base = OTHER; note = thymine; note = backbone modification: 5'-phosphorothioate; note = sugar modification: lna
  modified_base 2: mod_base = OTHER; note = backbone modification: 5'-phosphorothioate; note = thymine; note = sugar modification: lna
  modified_base 3: mod_base = m5c; mod_base = OTHER; note = backbone modification: 5'-phosphorothioate; note = sugar modification: 2'-O-methoxyethylribose
  modified_base 4: mod_base = OTHER; note = sugar modification: 2'-O-methoxyethylribose; note = backbone modification: 5'-phosphorothioate; note = thymine
  modified_base 5: mod_base = OTHER; note = sugar modification: 2'-O-methoxyethylribose; note = backbone modification: 5'-phosphorothioate
  modified_base 6: mod_base = OTHER; note = sugar modification: 2'-O-methoxyethylribose; note = backbone modification: 5'-phosphorothioate
  modified_base 7: mod_base = OTHER; note = backbone modification: 5'-phosphorothioate; note = sugar modification: 2'-O-methoxyethylribose
  modified_base 8: mod_base = OTHER; note = backbone modification: 5'-phosphorothioate; note = sugar modification: 2'-O-methoxyethylribose
  modified_base 9: mod_base = OTHER; note = sugar modification: 2'-O-methoxyethylribose; note = backbone modification: 5'-phosphorothioate
  modified_base 10: mod_base = OTHER; note = sugar modification: 2'-O-methoxyethylribose; note = thymine; note = backbone modification: 5'-phosphorothioate
  modified_base 11: mod_base = OTHER; note = backbone modification: 5'-phosphorothioate; note = sugar modification: 2'-O-methoxyethylribose
  modified_base 12: mod_base = OTHER; note = thymine; note = backbone modification: 5'-phosphorothioate; note = sugar modification: 2'-O-methoxyethylribose
  modified_base 13: mod_base = OTHER; note = sugar modification: 2'-O-methoxyethylribose; note = thymine; note = backbone modification: 5'-phosphorothioate
  modified_base 14: mod_base = m5c; mod_base = OTHER; note = sugar modification: 2'-O-methoxyethylribose; note = backbone modification: 5'-phosphorothioate
  modified_base 15: mod_base = OTHER; note = backbone modification: 5'-phosphorothioate; note = sugar modification: 2'-O-methoxyethylribose; note = thymine
  modified_base 16: mod_base = OTHER; note = thymine; note = sugar modification: 2'-O-methoxyethylribose; note = backbone modification: 5'-phosphorothioate
  modified_base 17: mod_base = OTHER; note = sugar modification: lna; note = backbone modification: 5'-phosphorothioate
  modified_base 18: mod_base = OTHER; note = sugar modification: lna; note = thymine
ttctgaaggtgttcttgt

SEQ ID NO: 423 - RNA, 18 nt, synthetic construct
  source 1..18: mol_type = other RNA; note = Antisense oligonucleotide
  modified_base 1: mod_base = OTHER; note = backbone modification: 5'-phosphorothioate; note = sugar modification: lna
  modified_base 2: mod_base = OTHER; note = thymine; note = sugar modification: lna; note = backbone modification: 5'-phosphorothioate
  modified_base 3: mod_base = OTHER; note = thymine; note = sugar modification: 2'-O-methoxyethylribose; note = backbone modification: 5'-phosphorothioate
  modified_base 4: mod_base = OTHER; mod_base = m5c; note = sugar modification: 2'-O-methoxyethylribose; note = backbone modification: 5'-phosphorothioate
  modified_base 5: mod_base = OTHER; note = thymine; note = sugar modification: 2'-O-methoxyethylribose; note = backbone modification: 5'-phosphorothioate
  modified_base 6: mod_base = OTHER; note = sugar modification: 2'-O-methoxyethylribose; note = backbone modification: 5'-phosphorothioate
  modified_base 7: mod_base = OTHER; note = backbone modification: 5'-phosphorothioate; note = sugar modification: 2'-O-methoxyethylribose
  modified_base 8: mod_base = OTHER; note = backbone modification: 5'-phosphorothioate; note = sugar modification: 2'-O-methoxyethylribose
  modified_base 9: mod_base = OTHER; note = sugar modification: 2'-O-methoxyethylribose; note = backbone modification: 5'-phosphorothioate
  modified_base 10: mod_base = OTHER; note = backbone modification: 5'-phosphorothioate; note = sugar modification: 2'-O-methoxyethylribose
  modified_base 11: mod_base = OTHER; note = backbone modification: 5'-phosphorothioate; note = thymine; note = sugar modification: 2'-O-methoxyethylribose
  modified_base 12: mod_base = OTHER; note = sugar modification: 2'-O-methoxyethylribose; note = backbone modification: 5'-phosphorothioate
  modified_base 13: mod_base = OTHER; note = sugar modification: 2'-O-methoxyethylribose; note = backbone modification: 5'-phosphorothioate; note = thymine
  modified_base 14: mod_base = OTHER; note = backbone modification: 5'-phosphorothioate; note = sugar modification: 2'-O-methoxyethylribose; note = thymine
  modified_base 15: mod_base = OTHER; mod_base = m5c; note = sugar modification: 2'-O-methoxyethylribose; note = backbone modification: 5'-phosphorothioate
  modified_base 16: mod_base = OTHER; note = backbone modification: 5'-phosphorothioate; note = sugar modification: 2'-O-methoxyethylribose; note = thymine
  modified_base 17: mod_base = OTHER; note = backbone modification: 5'-phosphorothioate; note = sugar modification: lna; note = thymine
  modified_base 18: mod_base = OTHER; note = sugar modification: lna
gttctgaaggtgttcttg

SEQ ID NO: 424 - RNA, 18 nt, synthetic construct
  source 1..18: mol_type = other RNA; note = Antisense oligonucleotide
  modified_base 1: mod_base = OTHER; note = backbone modification: 5'-phosphorothioate; note = sugar modification: lna
  modified_base 2: mod_base = OTHER; note = backbone modification: 5'-phosphorothioate; note = sugar modification: lna
  modified_base 3: mod_base = OTHER; note = thymine; note = sugar modification: 2'-O-methoxyethylribose; note = backbone modification: 5'-phosphorothioate
  modified_base 4: mod_base = OTHER; note = thymine; note = backbone modification: 5'-phosphorothioate; note = sugar modification: 2'-O-methoxyethylribose
  modified_base 5: mod_base = OTHER; mod_base = m5c; note = sugar modification: 2'-O-methoxyethylribose; note = backbone modification: 5'-phosphorothioate
  modified_base 6: mod_base = OTHER; note = sugar modification: 2'-O-methoxyethylribose; note = thymine; note = backbone modification: 5'-phosphorothioate
  modified_base 7: mod_base = OTHER; note = sugar modification: 2'-O-methoxyethylribose; note = backbone modification: 5'-phosphorothioate
  modified_base 8: mod_base = OTHER; note = sugar modification: 2'-O-methoxyethylribose; note = backbone modification: 5'-phosphorothioate
  modified_base 9: mod_base = OTHER; note = backbone modification: 5'-phosphorothioate; note = sugar modification: 2'-O-methoxyethylribose
  modified_base 10: mod_base = OTHER; note = sugar modification: 2'-O-methoxyethylribose; note = backbone modification: 5'-phosphorothioate
  modified_base 11: mod_base = OTHER; note = backbone modification: 5'-phosphorothioate; note = sugar modification: 2'-O-methoxyethylribose
  modified_base 12: mod_base = OTHER; note = backbone modification: 5'-phosphorothioate; note = thymine; note = sugar modification: 2'-O-methoxyethylribose
  modified_base 13: mod_base = OTHER; note = sugar modification: 2'-O-methoxyethylribose; note = backbone modification: 5'-phosphorothioate
  modified_base 14: mod_base = OTHER; note = sugar modification: 2'-O-methoxyethylribose; note = backbone modification: 5'-phosphorothioate; note = thymine
  modified_base 15: mod_base = OTHER; note = thymine; note = backbone modification: 5'-phosphorothioate; note = sugar modification: 2'-O-methoxyethylribose
  modified_base 16: mod_base = m5c; mod_base = OTHER; note = sugar modification: 2'-O-methoxyethylribose; note = backbone modification: 5'-phosphorothioate
  modified_base 17: mod_base = OTHER; note = thymine; note = backbone modification: 5'-phosphorothioate; note = sugar modification: lna
  modified_base 18: mod_base = OTHER; note = sugar modification: lna; note = thymine
ggttctgaaggtgttctt

SEQ ID NO: 425 - RNA, 18 nt, synthetic construct
  source 1..18: mol_type = other RNA; note = Antisense oligonucleotide
  modified_base 1: mod_base = m5c; mod_base = OTHER; note = backbone modification: 5'-phosphorothioate; note = sugar modification: lna
  modified_base 2: mod_base = OTHER; note = sugar modification: lna; note = backbone modification: 5'-phosphorothioate
  modified_base 3: mod_base = OTHER; note = sugar modification: 2'-O-methoxyethylribose; note = backbone modification: 5'-phosphorothioate
  modified_base 4: mod_base = OTHER; note = backbone modification: 5'-phosphorothioate; note = sugar modification: 2'-O-methoxyethylribose; note = thymine
  modified_base 5: mod_base = OTHER; note = backbone modification: 5'-phosphorothioate; note = sugar modification: 2'-O-methoxyethylribose; note = thymine
  modified_base 6: mod_base = m5c; mod_base = OTHER; note = sugar modification: 2'-O-methoxyethylribose; note = backbone modification: 5'-phosphorothioate
  modified_base 7: mod_base = OTHER; note = backbone modification: 5'-phosphorothioate; note = sugar modification: 2'-O-methoxyethylribose; note = thymine
  modified_base 8: mod_base = OTHER; note = backbone modification: 5'-phosphorothioate; note = sugar modification: 2'-O-methoxyethylribose
  modified_base 9: mod_base = OTHER; note = sugar modification: 2'-O-methoxyethylribose; note = backbone modification: 5'-phosphorothioate
  modified_base 10: mod_base = OTHER; note = backbone modification: 5'-phosphorothioate; note = sugar modification: 2'-O-methoxyethylribose
  modified_base 11: mod_base = OTHER; note = sugar modification: 2'-O-methoxyethylribose; note = backbone modification: 5'-phosphorothioate
  modified_base 12: mod_base = OTHER; note = sugar modification: 2'-O-methoxyethylribose; note = backbone modification: 5'-phosphorothioate
  modified_base 13: mod_base = OTHER; note = thymine; note = backbone modification: 5'-phosphorothioate; note = sugar modification: 2'-O-methoxyethylribose
  modified_base 14: mod_base = OTHER; note = backbone modification: 5'-phosphorothioate; note = sugar modification: 2'-O-methoxyethylribose
  modified_base 15: mod_base = OTHER; note = thymine; note = backbone modification: 5'-phosphorothioate; note = sugar modification: 2'-O-methoxyethylribose
  modified_base 16: mod_base = OTHER; note = thymine; note = sugar modification: 2'-O-methoxyethylribose; note = backbone modification: 5'-phosphorothioate
  modified_base 17: mod_base = m5c; mod_base = OTHER; note = sugar modification: lna; note = backbone modification: 5'-phosphorothioate
  modified_base 18: mod_base = OTHER; note = thymine; note = sugar modification: lna
cggttctgaaggtgttct

SEQ ID NO: 426 - RNA, 18 nt, synthetic construct
  source 1..18: mol_type = other RNA; note = Antisense oligonucleotide
  modified_base 1: mod_base = m5c; mod_base = OTHER; note = sugar modification: lna; note = backbone modification: 5'-phosphorothioate
  modified_base 2: mod_base = m5c; mod_base = OTHER; note = backbone modification: 5'-phosphorothioate; note = sugar modification: lna
  modified_base 3: mod_base = OTHER; note = backbone modification: 5'-phosphorothioate; note = sugar modification: 2'-O-methoxyethylribose
  modified_base 4: mod_base = OTHER; note = sugar modification: 2'-O-methoxyethylribose; note = backbone modification: 5'-phosphorothioate
  modified_base 5: mod_base = OTHER; note = thymine; note = sugar modification: 2'-O-methoxyethylribose; note = backbone modification: 5'-phosphorothioate
  modified_base 6: mod_base = OTHER; note = thymine; note = sugar modification: 2'-O-methoxyethylribose; note = backbone modification: 5'-phosphorothioate
  modified_base 7: mod_base = OTHER; mod_base = m5c; note = sugar modification: 2'-O-methoxyethylribose; note = backbone modification: 5'-phosphorothioate
  modified_base 8: mod_base = OTHER; note = thymine; note = sugar modification: 2'-O-methoxyethylribose; note = backbone modification: 5'-phosphorothioate
  modified_base 9: mod_base = OTHER; note = backbone modification: 5'-phosphorothioate; note = sugar modification: 2'-O-methoxyethylribose
  modified_base 10: mod_base = OTHER; note = sugar modification: 2'-O-methoxyethylribose; note = backbone modification: 5'-phosphorothioate
  modified_base 11: mod_base = OTHER; note = sugar modification: 2'-O-methoxyethylribose; note = backbone modification: 5'-phosphorothioate
  modified_base 12: mod_base = OTHER; note = sugar modification: 2'-O-methoxyethylribose; note = backbone modification: 5'-phosphorothioate
  modified_base 13: mod_base = OTHER; note = sugar modification: 2'-O-methoxyethylribose; note = backbone modification: 5'-phosphorothioate
  modified_base 14: mod_base = OTHER; note = backbone modification: 5'-phosphorothioate; note = thymine; note = sugar modification: 2'-O-methoxyethylribose
  modified_base 15: mod_base = OTHER; note = backbone modification: 5'-phosphorothioate; note = sugar modification: 2'-O-methoxyethylribose
  modified_base 16: mod_base = OTHER; note = sugar modification: 2'-O-methoxyethylribose; note = thymine; note = backbone modification: 5'-phosphorothioate
  modified_base 17: mod_base = OTHER; note = sugar modification: lna; note = thymine; note = backbone modification: 5'-phosphorothioate
  modified_base 18: mod_base = OTHER; mod_base = m5c; note = sugar modification: lna
ccggttctgaaggtgttc

SEQ ID NO: 427 - RNA, 18 nt, synthetic construct
  source 1..18: mol_type = other RNA; note = Antisense oligonucleotide
  modified_base 1: mod_base = OTHER; note = backbone modification: 5'-phosphorothioate; note = sugar modification: lna; note = thymine
  modified_base 2: mod_base = m5c; mod_base = OTHER; note = sugar modification: lna; note = backbone modification: 5'-phosphorothioate
  modified_base 3: mod_base = OTHER; mod_base = m5c; note = sugar modification: 2'-O-methoxyethylribose; note = backbone modification: 5'-phosphorothioate
  modified_base 4: mod_base = OTHER; note = backbone modification: 5'-phosphorothioate; note = sugar modification: 2'-O-methoxyethylribose
  modified_base 5: mod_base = OTHER; note = sugar modification: 2'-O-methoxyethylribose; note = backbone modification: 5'-phosphorothioate
  modified_base 6: mod_base = OTHER; note = backbone modification: 5'-phosphorothioate; note = sugar modification: 2'-O-methoxyethylribose; note = thymine
  modified_base 7: mod_base = OTHER; note = backbone modification: 5'-phosphorothioate; note = thymine; note = sugar modification: 2'-O-methoxyethylribose
  modified_base 8: mod_base = OTHER; mod_base = m5c; note = sugar modification: 2'-O-methoxyethylribose; note = backbone modification: 5'-phosphorothioate
  modified_base 9: mod_base = OTHER; note = backbone modification: 5'-phosphorothioate; note = thymine; note = sugar modification: 2'-O-methoxyethylribose
  modified_base 10: mod_base = OTHER; note = sugar modification: 2'-O-methoxyethylribose; note = backbone modification: 5'-phosphorothioate
  modified_base 11: mod_base = OTHER; note = backbone modification: 5'-phosphorothioate; note = sugar modification: 2'-O-methoxyethylribose
  modified_base 12: mod_base = OTHER; note = sugar modification: 2'-O-methoxyethylribose; note = backbone modification: 5'-phosphorothioate
  modified_base 13: mod_base = OTHER; note = sugar modification: 2'-O-methoxyethylribose; note = backbone modification: 5'-phosphorothioate
  modified_base 14: mod_base = OTHER; note = sugar modification: 2'-O-methoxyethylribose; note = backbone modification: 5'-phosphorothioate
  modified_base 15: mod_base = OTHER; note = thymine; note = backbone modification: 5'-phosphorothioate; note = sugar modification: 2'-O-methoxyethylribose
  modified_base 16: mod_base = OTHER; note = sugar modification: 2'-O-methoxyethylribose; note = backbone modification: 5'-phosphorothioate
  modified_base 17: mod_base = OTHER; note = thymine; note = backbone modification: 5'-phosphorothioate; note = sugar modification: lna
  modified_base 18: mod_base = OTHER; note = thymine; note = sugar modification: lna
tccggttctgaaggtgtt

SEQ ID NO: 428 - RNA, 18 nt, synthetic construct
  source 1..18: mol_type = other RNA; note = Antisense oligonucleotide
  modified_base 1: mod_base = m5c; mod_base = OTHER; note = backbone modification: 5'-phosphorothioate; note = sugar modification: lna
  modified_base 2: mod_base = OTHER; note = backbone modification: 5'-phosphorothioate; note = thymine; note = sugar modification: lna
  modified_base 3: mod_base = OTHER; mod_base = m5c; note = backbone modification: 5'-phosphorothioate; note = sugar modification: 2'-O-methoxyethylribose
  modified_base 4: mod_base = m5c; mod_base = OTHER; note = sugar modification: 2'-O-methoxyethylribose; note = backbone modification: 5'-phosphorothioate
  modified_base 5: mod_base = OTHER; note = backbone modification: 5'-phosphorothioate; note = sugar modification: 2'-O-methoxyethylribose
  modified_base 6: mod_base = OTHER; note = backbone modification: 5'-phosphorothioate; note = sugar modification: 2'-O-methoxyethylribose
  modified_base 7: mod_base = OTHER; note = thymine; note = sugar modification: 2'-O-methoxyethylribose; note = backbone modification: 5'-phosphorothioate
  modified_base 8: mod_base = OTHER; note = sugar modification: 2'-O-methoxyethylribose; note = backbone modification: 5'-phosphorothioate; note = thymine
  modified_base 9: mod_base = OTHER; mod_base = m5c; note = sugar modification: 2'-O-methoxyethylribose; note = backbone modification: 5'-phosphorothioate
  modified_base 10: mod_base = OTHER; note = thymine; note = backbone modification: 5'-phosphorothioate; note = sugar modification: 2'-O-methoxyethylribose
  modified_base 11: mod_base = OTHER; note = backbone modification: 5'-phosphorothioate; note = sugar modification: 2'-O-methoxyethylribose
  modified_base 12: mod_base = OTHER; note = backbone modification: 5'-phosphorothioate; note = sugar modification: 2'-O-methoxyethylribose
  modified_base 13: mod_base = OTHER; note = backbone modification: 5'-phosphorothioate; note = sugar modification: 2'-O-methoxyethylribose
  modified_base 14: mod_base = OTHER; note = backbone modification: 5'-phosphorothioate; note = sugar modification: 2'-O-methoxyethylribose
  modified_base 15: mod_base = OTHER; note = backbone modification: 5'-phosphorothioate; note = sugar modification: 2'-O-methoxyethylribose
  modified_base 16: mod_base = OTHER; note = backbone modification: 5'-phosphorothioate; note = sugar modification: 2'-O-methoxyethylribose; note = thymine
  modified_base 17: mod_base = OTHER; note = backbone modification: 5'-phosphorothioate; note = sugar modification: lna
  modified_base 18: mod_base = OTHER; note = thymine; note = sugar modification: lna
ctccggttctgaaggtgt

SEQ ID NO: 429 - RNA, 18 nt, synthetic construct
  source 1..18: mol_type = other RNA; note = Antisense oligonucleotide
  modified_base 1: mod_base = m5c; mod_base = OTHER; note = backbone modification: 5'-phosphorothioate; note = sugar modification: lna
  modified_base 2: mod_base = m5c; mod_base = OTHER; note = sugar modification: lna; note = backbone modification: 5'-phosphorothioate
  modified_base 3: mod_base = OTHER; note = sugar modification: 2'-O-methoxyethylribose; note = backbone modification: 5'-phosphorothioate; note = thymine
  modified_base 4: mod_base = OTHER; mod_base = m5c; note = sugar modification: 2'-O-methoxyethylribose; note = backbone modification: 5'-phosphorothioate
  modified_base 5: mod_base = m5c; mod_base = OTHER; note = backbone modification: 5'-phosphorothioate; note = sugar modification: 2'-O-methoxyethylribose
  modified_base 6: mod_base = OTHER; note = sugar modification: 2'-O-methoxyethylribose; note = backbone modification: 5'-phosphorothioate
  modified_base 7: mod_base = OTHER; note = backbone modification: 5'-phosphorothioate; note = sugar modification: 2'-O-methoxyethylribose
  modified_base 8: mod_base = OTHER; note = thymine; note = backbone modification: 5'-phosphorothioate; note = sugar modification: 2'-O-methoxyethylribose
  modified_base 9: mod_base = OTHER; note = thymine; note = backbone modification: 5'-phosphorothioate; note = sugar modification: 2'-O-methoxyethylribose
  modified_base 10: mod_base = m5c; mod_base = OTHER; note = backbone modification: 5'-phosphorothioate; note = sugar modification: 2'-O-methoxyethylribose
  modified_base 11: mod_base = OTHER; note = backbone modification: 5'-phosphorothioate; note = sugar modification: 2'-O-methoxyethylribose; note = thymine
  modified_base 12: mod_base = OTHER; note = backbone modification: 5'-phosphorothioate; note = sugar modification: 2'-O-methoxyethylribose
  modified_base 13: mod_base = OTHER; note = sugar modification: 2'-O-methoxyethylribose; note = backbone modification: 5'-phosphorothioate
  modified_base 14: mod_base = OTHER; note = sugar modification: 2'-O-methoxyethylribose; note = backbone modification: 5'-phosphorothioate
  modified_base 15: mod_base = OTHER; note = sugar modification: 2'-O-methoxyethylribose; note = backbone modification: 5'-phosphorothioate
  modified_base 16: mod_base = OTHER; note = sugar modification: 2'-O-methoxyethylribose; note = backbone modification: 5'-phosphorothioate
  modified_base 17: mod_base = OTHER; note = backbone modification: 5'-phosphorothioate; note = sugar modification: lna; note = thymine
  modified_base 18: mod_base = OTHER; note = sugar modification: lna
cctccggttctgaaggtg

SEQ ID NO: 430 - RNA, 18 nt, synthetic construct
  source 1..18: mol_type = other RNA; note = Antisense oligonucleotide
  modified_base 1: mod_base = OTHER; note = backbone modification: 5'-phosphorothioate; note = sugar modification: lna
  modified_base 2: mod_base = m5c; mod_base = OTHER; note = sugar modification: lna; note = backbone modification: 5'-phosphorothioate
  modified_base 3: mod_base = m5c; mod_base = OTHER; note = sugar modification: 2'-O-methoxyethylribose; note = backbone modification: 5'-phosphorothioate
  modified_base 4: mod_base = OTHER; note = sugar modification: 2'-O-methoxyethylribose; note = backbone modification: 5'-phosphorothioate; note = thymine
  modified_base 5: mod_base = OTHER; mod_base = m5c; note = backbone modification: 5'-phosphorothioate; note = sugar modification: 2'-O-methoxyethylribose
  modified_base 6: mod_base = m5c; mod_base = OTHER; note = backbone modification: 5'-phosphorothioate; note = sugar modification: 2'-O-methoxyethylribose
  modified_base 7: mod_base = OTHER; note = backbone modification: 5'-phosphorothioate; note = sugar modification: 2'-O-methoxyethylribose
  modified_base 8: mod_base = OTHER; note = backbone modification: 5'-phosphorothioate; note = sugar modification: 2'-O-methoxyethylribose
  modified_base 9: mod_base = OTHER; note = thymine; note = backbone modification: 5'-phosphorothioate; note = sugar modification: 2'-O-methoxyethylribose
  modified_base 10: mod_base = OTHER; note = sugar modification: 2'-O-methoxyethylribose; note = backbone modification: 5'-phosphorothioate; note = thymine
  modified_base 11: mod_base = m5c; mod_base = OTHER; note = sugar modification: 2'-O-methoxyethylribose; note = backbone modification: 5'-phosphorothioate
  modified_base 12: mod_base = OTHER; note = sugar modification: 2'-O-methoxyethylribose; note = backbone modification: 5'-phosphorothioate; note = thymine
  modified_base 13: mod_base = OTHER; note = sugar modification: 2'-O-methoxyethylribose; note = backbone modification: 5'-phosphorothioate
  modified_base 14: mod_base = OTHER; note = sugar modification: 2'-O-methoxyethylribose; note = backbone modification: 5'-phosphorothioate
  modified_base 15: mod_base = OTHER; note = backbone modification: 5'-phosphorothioate; note = sugar modification: 2'-O-methoxyethylribose
  modified_base 16: mod_base = OTHER; note = backbone modification: 5'-phosphorothioate; note = sugar modification: 2'-O-methoxyethylribose
  modified_base 17: mod_base = OTHER; note = sugar modification: lna; note = backbone modification: 5'-phosphorothioate
  modified_base 18: mod_base = OTHER; note = thymine; note = sugar modification: lna
gcctccggttctgaaggt

SEQ ID NO: 431 - RNA, 18 nt, synthetic construct
  source 1..18: mol_type = other RNA; note = Antisense oligonucleotide
  modified_base 1: mod_base = OTHER; note = sugar modification: lna; note = backbone modification: 5'-phosphorothioate; note = thymine
  modified_base 2: mod_base = OTHER; note = sugar modification: lna; note = backbone modification: 5'-phosphorothioate
  modified_base 3: mod_base = OTHER; mod_base = m5c; note = backbone modification: 5'-phosphorothioate; note = sugar modification: 2'-O-methoxyethylribose
  modified_base 4: mod_base = OTHER; mod_base = m5c; note = sugar modification: 2'-O-methoxyethylribose; note = backbone modification: 5'-phosphorothioate
  modified_base 5: mod_base = OTHER; note = sugar modification: 2'-O-methoxyethylribose; note = backbone modification: 5'-phosphorothioate; note = thymine
  modified_base 6: mod_base = OTHER; mod_base = m5c; note = backbone modification: 5'-phosphorothioate; note = sugar modification: 2'-O-methoxyethylribose
  modified_base 7: mod_base = m5c; mod_base = OTHER; note = backbone modification: 5'-phosphorothioate; note = sugar modification: 2'-O-methoxyethylribose
  modified_base 8: mod_base = OTHER; note = backbone modification: 5'-phosphorothioate; note = sugar modification: 2'-O-methoxyethylribose
  modified_base 9: mod_base = OTHER; note = backbone modification: 5'-phosphorothioate; note = sugar modification: 2'-O-methoxyethylribose
  modified_base 10: mod_base = OTHER; note = thymine; note = sugar modification: 2'-O-methoxyethylribose; note = backbone modification: 5'-phosphorothioate
  modified_base 11: mod_base = OTHER; note = thymine; note = backbone modification: 5'-phosphorothioate; note = sugar modification: 2'-O-methoxyethylribose
  modified_base 12: mod_base = m5c; mod_base = OTHER; note = sugar modification: 2'-O-methoxyethylribose; note = backbone modification: 5'-phosphorothioate
  modified_base 13: mod_base = OTHER; note = backbone modification: 5'-phosphorothioate; note = thymine; note = sugar modification: 2'-O-methoxyethylribose
  modified_base 14: mod_base = OTHER; note = backbone modification: 5'-phosphorothioate; note = sugar modification: 2'-O-methoxyethylribose
  modified_base 15: mod_base = OTHER; note = sugar modification: 2'-O-methoxyethylribose; note = backbone modification: 5'-phosphorothioate
  modified_base 16: mod_base = OTHER; note = backbone modification: 5'-phosphorothioate; note = sugar modification: 2'-O-methoxyethylribose
  modified_base 17: mod_base = OTHER; note = sugar modification: lna; note = backbone modification: 5'-phosphorothioate
  modified_base 18: mod_base = OTHER; note = sugar modification: lna
tgcctccggttctgaagg

SEQ ID NO: 432 - RNA, 18 nt, synthetic construct
  source 1..18: mol_type = other RNA; note = Antisense oligonucleotide
  modified_base 1: mod_base = OTHER; note = thymine; note = backbone modification: 5'-phosphorothioate; note = sugar modification: lna
  modified_base 2: mod_base = OTHER; note = thymine; note = backbone modification: 5'-phosphorothioate; note = sugar modification: lna
  modified_base 3: mod_base = OTHER; note = sugar modification: 2'-O-methoxyethylribose; note = backbone modification: 5'-phosphorothioate
  modified_base 4: mod_base = OTHER; mod_base = m5c; note = backbone modification: 5'-phosphorothioate; note = sugar modification: 2'-O-methoxyethylribose
  modified_base 5: mod_base = OTHER; mod_base = m5c; note = sugar modification: 2'-O-methoxyethylribose; note = backbone modification: 5'-phosphorothioate
  modified_base 6: mod_base = OTHER; note = sugar modification: 2'-O-methoxyethylribose; note = thymine; note = backbone modification: 5'-phosphorothioate
  modified_base 7: mod_base = m5c; mod_base = OTHER; note = backbone modification: 5'-phosphorothioate; note = sugar modification: 2'-O-methoxyethylribose
  modified_base 8: mod_base = m5c; mod_base = OTHER; note = sugar modification: 2'-O-methoxyethylribose; note = backbone modification: 5'-phosphorothioate
  modified_base 9: mod_base = OTHER; note = sugar modification: 2'-O-methoxyethylribose; note = backbone modification: 5'-phosphorothioate
  modified_base 10: mod_base = OTHER; note = backbone modification: 5'-phosphorothioate; note = sugar modification: 2'-O-methoxyethylribose
  modified_base 11: mod_base = OTHER; note = thymine; note = sugar modification: 2'-O-methoxyethylribose; note = backbone modification: 5'-phosphorothioate
  modified_base 12: mod_base = OTHER; note = thymine; note = sugar modification: 2'-O-methoxyethylribose; note = backbone modification: 5'-phosphorothioate
  modified_base 13: mod_base = m5c; mod_base = OTHER; note = sugar modification: 2'-O-methoxyethylribose; note = backbone modification: 5'-phosphorothioate
  modified_base 14: mod_base = OTHER; note = backbone modification: 5'-phosphorothioate; note = sugar modification: 2'-O-methoxyethylribose; note = thymine
  modified_base 15: mod_base = OTHER; note = backbone modification: 5'-phosphorothioate; note = sugar modification: 2'-O-methoxyethylribose
  modified_base 16: mod_base = OTHER; note = sugar modification: 2'-O-methoxyethylribose; note = backbone modification: 5'-phosphorothioate
  modified_base 17: mod_base = OTHER; note = backbone modification: 5'-phosphorothioate; note = sugar modification: lna
  modified_base 18: mod_base = OTHER; note = sugar modification: lna
ttgcctccggttctgaag

SEQ ID NO: 433 - RNA, 18 nt, synthetic construct
  source 1..18: mol_type = other RNA; note = Antisense oligonucleotide
  modified_base 1: mod_base = OTHER; note = sugar modification: lna; note = backbone modification: 5'-phosphorothioate
  modified_base 2: mod_base = OTHER; note = thymine; note = sugar modification: lna; note = backbone modification: 5'-phosphorothioate
  modified_base 3: mod_base = OTHER; note = backbone modification: 5'-phosphorothioate; note = thymine; note = sugar modification: 2'-O-methoxyethylribose
  modified_base 4: mod_base = OTHER; note = sugar modification: 2'-O-methoxyethylribose; note = backbone modification: 5'-phosphorothioate
  modified_base 5: mod_base = OTHER; mod_base = m5c; note = sugar modification: 2'-O-methoxyethylribose; note = backbone modification: 5'-phosphorothioate
  modified_base 6: mod_base = OTHER; mod_base = m5c; note = sugar modification: 2'-O-methoxyethylribose; note = backbone modification: 5'-phosphorothioate
  modified_base 7: mod_base = OTHER; note = sugar modification: 2'-O-methoxyethylribose; note = backbone modification: 5'-phosphorothioate; note = thymine
  modified_base 8: mod_base = OTHER; mod_base = m5c; note = backbone modification: 5'-phosphorothioate; note = sugar modification: 2'-O-methoxyethylribose
  modified_base 9: mod_base = OTHER; mod_base = m5c; note = backbone modification: 5'-phosphorothioate; note = sugar modification: 2'-O-methoxyethylribose
  modified_base 10: mod_base = OTHER; note = sugar modification: 2'-O-methoxyethylribose; note = backbone modification: 5'-phosphorothioate
  modified_base 11: mod_base = OTHER; note = backbone modification: 5'-phosphorothioate; note = sugar modification: 2'-O-methoxyethylribose
  modified_base 12: mod_base = OTHER; note = backbone modification: 5'-phosphorothioate; note = sugar modification: 2'-O-methoxyethylribose; note = thymine
  modified_base 13: mod_base = OTHER; note = backbone modification: 5'-phosphorothioate; note = thymine; note = sugar modification: 2'-O-methoxyethylribose
  modified_base 14: mod_base = OTHER; mod_base = m5c; note = sugar modification: 2'-O-methoxyethylribose; note = backbone modification: 5'-phosphorothioate
  modified_base 15: mod_base = OTHER; note = thymine; note = backbone modification: 5'-phosphorothioate; note = sugar modification: 2'-O-methoxyethylribose
  modified_base 16: mod_base = OTHER; note = backbone modification: 5'-phosphorothioate; note = sugar modification: 2'-O-methoxyethylribose
  modified_base 17: mod_base = OTHER; note = backbone modification: 5'-phosphorothioate; note = sugar modification: lna
  modified_base 18: mod_base = OTHER; note = sugar modification: lna
gttgcctccggttctgaa

SEQ ID NO: 434 - RNA, 18 nt, synthetic construct
  source 1..18: mol_type = other RNA; note = Antisense oligonucleotide
  modified_base 1: mod_base = OTHER; note = thymine; note = backbone modification: 5'-phosphorothioate; note = sugar modification: lna
  modified_base 2: mod_base = OTHER; note = sugar modification: lna; note = backbone modification: 5'-phosphorothioate
  modified_base 3: mod_base = OTHER; note = backbone modification: 5'-phosphorothioate; note = sugar modification: 2'-O-methoxyethylribose; note = thymine
  modified_base 4: mod_base = OTHER; note = backbone modification: 5'-phosphorothioate; note = sugar modification: 2'-O-methoxyethylribose; note = thymine
  modified_base 5: mod_base = OTHER; note = sugar modification: 2'-O-methoxyethylribose; note = backbone modification: 5'-phosphorothioate
  modified_base 6: mod_base = OTHER; mod_base = m5c; note = backbone modification: 5'-phosphorothioate; note = sugar modification: 2'-O-methoxyethylribose
  modified_base 7: mod_base = m5c; mod_base = OTHER; note = backbone modification: 5'-phosphorothioate; note = sugar modification: 2'-O-methoxyethylribose
  modified_base 8: mod_base = OTHER; note = sugar modification: 2'-O-methoxyethylribose; note = thymine; note = backbone modification: 5'-phosphorothioate
  modified_base 9: mod_base = m5c; mod_base = OTHER; note = backbone modification: 5'-phosphorothioate; note = sugar modification: 2'-O-methoxyethylribose
  modified_base 10: mod_base = m5c; mod_base = OTHER; note = backbone modification: 5'-phosphorothioate; note = sugar modification: 2'-O-methoxyethylribose
  modified_base 11: mod_base = OTHER; note = backbone modification: 5'-phosphorothioate; note = sugar modification: 2'-O-methoxyethylribose
  modified_base 12: mod_base = OTHER; note = sugar modification: 2'-O-methoxyethylribose; note = backbone modification: 5'-phosphorothioate
  modified_base 13: mod_base = OTHER; note = thymine; note = sugar modification: 2'-O-methoxyethylribose; note = backbone modification: 5'-phosphorothioate
  modified_base 14: mod_base = OTHER; note = thymine; note = backbone modification: 5'-phosphorothioate; note = sugar modification: 2'-O-methoxyethylribose
  modified_base 15: mod_base = OTHER; mod_base = m5c; note = sugar modification: 2'-O-methoxyethylribose; note = backbone modification: 5'-phosphorothioate
  modified_base 16: mod_base = OTHER; note = sugar modification: 2'-O-methoxyethylribose; note = thymine; note = backbone modification: 5'-phosphorothioate
  modified_base 17: mod_base = OTHER; note = sugar modification: lna; note = backbone modification: 5'-phosphorothioate
  modified_base 18: mod_base = OTHER; note = sugar modification: lna
tgttgcctccggttctga

SEQ ID NO: 435 - RNA, 18 nt, synthetic construct
  source 1..18: mol_type = other RNA; note = Antisense oligonucleotide
  modified_base 1: mod_base = m5c; mod_base = OTHER; note = sugar modification: lna; note = backbone modification: 5'-phosphorothioate
  modified_base 2: mod_base = OTHER; note = thymine; note = sugar modification: lna; note = backbone modification: 5'-phosphorothioate
  modified_base 3: mod_base = OTHER; note = sugar modification: 2'-O-methoxyethylribose; note = backbone modification: 5'-phosphorothioate
  modified_base 4: mod_base = OTHER; note = thymine; note = sugar modification: 2'-O-methoxyethylribose; note = backbone modification: 5'-phosphorothioate
  modified_base 5: mod_base = OTHER; note = sugar modification: 2'-O-methoxyethylribose; note = thymine; note = backbone modification: 5'-phosphorothioate
  modified_base 6: mod_base = OTHER; note = backbone modification: 5'-phosphorothioate; note = sugar modification: 2'-O-methoxyethylribose
  modified_base 7: mod_base = m5c; mod_base = OTHER; note = sugar modification: 2'-O-methoxyethylribose; note = backbone modification: 5'-phosphorothioate
  modified_base 8: mod_base = m5c; mod_base = OTHER; note = backbone modification: 5'-phosphorothioate; note = sugar modification: 2'-O-methoxyethylribose
  modified_base 9: mod_base = OTHER; note = backbone modification: 5'-phosphorothioate; note = sugar modification: 2'-O-methoxyethylribose; note = thymine
  modified_base 10: mod_base = m5c; mod_base = OTHER; note = backbone modification: 5'-phosphorothioate; note = sugar modification: 2'-O-methoxyethylribose
  modified_base 11: mod_base = OTHER; mod_base = m5c; note = sugar modification: 2'-O-methoxyethylribose; note = backbone modification: 5'-phosphorothioate
  modified_base 12: mod_base = OTHER; note = backbone modification: 5'-phosphorothioate; note = sugar modification: 2'-O-methoxyethylribose
  modified_base 13: mod_base = OTHER; note = sugar modification: 2'-O-methoxyethylribose; note = backbone modification: 5'-phosphorothioate
  modified_base 14: mod_base = OTHER; note = thymine; note = backbone modification: 5'-phosphorothioate; note = sugar modification: 2'-O-methoxyethylribose
  modified_base 15: mod_base = OTHER; note = thymine; note = sugar modification: 2'-O-methoxyethylribose; note = backbone modification: 5'-phosphorothioate
  modified_base 16: mod_base = m5c; mod_base = OTHER; note = sugar modification: 2'-O-methoxyethylribose; note = backbone modification: 5'-phosphorothioate
  modified_base 17: mod_base = OTHER; note = thymine; note = sugar modification: lna; note = backbone modification: 5'-phosphorothioate
  modified_base 18: mod_base = OTHER; note = sugar modification: lna
ctgttgcctccggttctg

SEQ ID NO: 436 - RNA, 18 nt, synthetic construct
  source 1..18: mol_type = other RNA; note = Antisense oligonucleotide
  modified_base 1: mod_base = OTHER; note = backbone modification: 5'-phosphorothioate; note = sugar modification: lna
  modified_base 2: mod_base = OTHER; mod_base = m5c; note = backbone modification: 5'-phosphorothioate; note = sugar modification: lna
  modified_base 3: mod_base = OTHER; note = sugar modification: 2'-O-methoxyethylribose; note = backbone modification: 5'-phosphorothioate; note = thymine
  modified_base 4: mod_base = OTHER; note = backbone modification: 5'-phosphorothioate; note = sugar modification: 2'-O-methoxyethylribose
  modified_base 5: mod_base = OTHER; note = backbone modification: 5'-phosphorothioate; note = sugar modification: 2'-O-methoxyethylribose; note = thymine
  modified_base 6: mod_base = OTHER; note = sugar modification: 2'-O-methoxyethylribose; note = thymine; note = backbone modification: 5'-phosphorothioate
  modified_base 7: mod_base = OTHER; note = backbone modification: 5'-phosphorothioate; note = sugar modification: 2'-O-methoxyethylribose
  modified_base 8: mod_base = m5c; mod_base = OTHER; note = backbone modification: 5'-phosphorothioate; note = sugar modification: 2'-O-methoxyethylribose
  modified_base 9: mod_base = OTHER; mod_base = m5c; note = backbone modification: 5'-phosphorothioate; note = sugar modification: 2'-O-methoxyethylribose
  modified_base 10: mod_base = OTHER; note = thymine; note = backbone modification: 5'-phosphorothioate; note = sugar modification: 2'-O-methoxyethylribose
  modified_base 11: mod_base = OTHER; mod_base = m5c; note = backbone modification: 5'-phosphorothioate; note = sugar modification: 2'-O-methoxyethylribose
  modified_base 12: mod_base = m5c; mod_base = OTHER; note = sugar modification: 2'-O-methoxyethylribose; note = backbone modification: 5'-phosphorothioate
  modified_base 13: mod_base = OTHER; note = sugar modification: 2'-O-methoxyethylribose; note = backbone modification: 5'-phosphorothioate
  modified_base 14: mod_base = OTHER; note = sugar modification: 2'-O-methoxyethylribose; note = backbone modification: 5'-phosphorothioate
  modified_base 15: mod_base = OTHER; note = sugar modification: 2'-O-methoxyethylribose; note = backbone modification: 5'-phosphorothioate; note = thymine
  modified_base 16: mod_base = OTHER; note = sugar modification: 2'-O-methoxyethylribose; note = thymine; note = backbone modification: 5'-phosphorothioate
  modified_base 17: mod_base = m5c; mod_base = OTHER; note = sugar modification: lna; note = backbone modification: 5'-phosphorothioate
  modified_base 18: mod_base = OTHER; note = thymine; note = sugar modification: lna
actgttgcctccggttct

SEQ ID NO: 437 - RNA, 18 nt, synthetic construct
  source 1..18: mol_type = other RNA; note = Antisense oligonucleotide
  modified_base 1: mod_base = OTHER; note = backbone modification: 5'-phosphorothioate; note = sugar modification: lna
  modified_base 2: mod_base = OTHER; note = backbone modification: 5'-phosphorothioate; note = sugar modification: lna
  modified_base 3: mod_base = m5c; mod_base = OTHER; note = backbone modification: 5'-phosphorothioate; note = sugar modification: 2'-O-methoxyethylribose
  modified_base 4: mod_base = OTHER; note = backbone modification: 5'-phosphorothioate; note = sugar modification: 2'-O-methoxyethylribose; note = thymine
  modified_base 5: mod_base = OTHER; note = sugar modification: 2'-O-methoxyethylribose; note = backbone modification: 5'-phosphorothioate
  modified_base 6: mod_base = OTHER; note = thymine; note = sugar modification: 2'-O-methoxyethylribose; note = backbone modification: 5'-phosphorothioate
  modified_base 7: mod_base = OTHER; note = sugar modification: 2'-O-methoxyethylribose; note = thymine; note = backbone modification: 5'-phosphorothioate
  modified_base 8: mod_base = OTHER; note = backbone modification: 5'-phosphorothioate; note = sugar modification: 2'-O-methoxyethylribose
  modified_base 9: mod_base = m5c; mod_base = OTHER; note = backbone modification: 5'-phosphorothioate; note = sugar modification: 2'-O-methoxyethylribose
  modified_base 10: mod_base = m5c; mod_base = OTHER; note = backbone modification: 5'-phosphorothioate; note = sugar modification: 2'-O-methoxyethylribose
  modified_base 11: mod_base = OTHER; note = backbone modification: 5'-phosphorothioate; note = sugar modification: 2'-O-methoxyethylribose; note = thymine
  modified_base 12: mod_base = m5c; mod_base = OTHER; note = backbone modification: 5'-phosphorothioate; note = sugar modification: 2'-O-methoxyethylribose
  modified_base 13: mod_base = m5c; mod_base = OTHER; note = backbone modification: 5'-phosphorothioate; note = sugar modification: 2'-O-methoxyethylribose
  modified_base 14: mod_base = OTHER; note = backbone modification: 5'-phosphorothioate; note = sugar modification: 2'-O-methoxyethylribose
  modified_base 15: mod_base = OTHER; note = sugar modification: 2'-O-methoxyethylribose; note = backbone modification: 5'-phosphorothioate
  modified_base 16: mod_base = OTHER; note = thymine; note = sugar modification: 2'-O-methoxyethylribose; note = backbone modification: 5'-phosphorothioate
  modified_base 17: mod_base = OTHER; note = backbone modification: 5'-phosphorothioate; note = thymine; note = sugar modification: lna
  modified_base 18: mod_base = m5c; mod_base = OTHER; note = sugar modification: lna
aactgttgcctccggttc

SEQ ID NO: 438 - RNA, 18 nt, synthetic construct
  source 1..18: mol_type = other RNA; note = Antisense oligonucleotide
  modified_base 1: mod_base = m5c; mod_base = OTHER; note = sugar modification: lna; note = backbone modification: 5'-phosphorothioate
  modified_base 2: mod_base = OTHER; note = sugar modification: lna; note = backbone modification: 5'-phosphorothioate
  modified_base 3: mod_base = OTHER; note = backbone modification: 5'-phosphorothioate; note = sugar modification: 2'-O-methoxyethylribose
  modified_base 4: mod_base = OTHER; mod_base = m5c; note = sugar modification: 2'-O-methoxyethylribose; note = backbone modification: 5'-phosphorothioate
  modified_base 5: mod_base = OTHER; note = sugar modification: 2'-O-methoxyethylribose; note = backbone modification: 5'-phosphorothioate; note = thymine
  modified_base 6: mod_base = OTHER; note = backbone modification: 5'-phosphorothioate; note = sugar modification: 2'-O-methoxyethylribose
  modified_base 7: mod_base = OTHER; note = sugar modification: 2'-O-methoxyethylribose; note = backbone modification: 5'-phosphorothioate; note = thymine
  modified_base 8: mod_base = OTHER; note = sugar modification: 2'-O-methoxyethylribose; note = backbone modification: 5'-phosphorothioate; note = thymine
  modified_base 9: mod_base = OTHER; note = backbone modification: 5'-phosphorothioate; note = sugar modification: 2'-O-methoxyethylribose
  modified_base 10: mod_base = OTHER; mod_base = m5c; note = backbone modification: 5'-phosphorothioate; note = sugar modification: 2'-O-methoxyethylribose
  modified_base 11: mod_base = OTHER; mod_base = m5c; note = sugar modification: 2'-O-methoxyethylribose; note = backbone modification: 5'-phosphorothioate
  modified_base 12: mod_base = OTHER; note = sugar modification: 2'-O-methoxyethylribose; note = backbone modification: 5'-phosphorothioate; note = thymine
  modified_base 13: mod_base = m5c; mod_base = OTHER; note = sugar modification: 2'-O-methoxyethylribose; note = backbone modification: 5'-phosphorothioate
  modified_base 14: mod_base = OTHER; mod_base = m5c; note = backbone modification: 5'-phosphorothioate; note = sugar modification: 2'-O-methoxyethylribose
  modified_base 15: mod_base = OTHER; note = backbone modification: 5'-phosphorothioate; note = sugar modification: 2'-O-methoxyethylribose
  modified_base 16: mod_base = OTHER; note = backbone modification: 5'-phosphorothioate; note = sugar modification: 2'-O-methoxyethylribose
  modified_base 17: mod_base = OTHER; note = sugar modification: lna; note = thymine; note = backbone modification: 5'-phosphorothioate
  modified_base 18: mod_base = OTHER; note = sugar modification: lna; note = thymine
caactgttgcctccggtt

SEQ ID NO: 439 - RNA, 18 nt, synthetic construct
  source 1..18: mol_type = other RNA; note = Antisense oligonucleotide
  modified_base 1: mod_base = OTHER; note = thymine; note = sugar modification: lna; note = backbone modification: 5'-phosphorothioate
  modified_base 2: mod_base = OTHER; mod_base = m5c; note = backbone modification: 5'-phosphorothioate; note = sugar modification: lna
  modified_base 3: mod_base = OTHER; note = sugar modification: 2'-O-methoxyethylribose; note = backbone modification: 5'-phosphorothioate
  modified_base 4: mod_base = OTHER; note = backbone modification: 5'-phosphorothioate; note = sugar modification: 2'-O-methoxyethylribose
  modified_base 5: mod_base = m5c; mod_base = OTHER; note = backbone modification: 5'-phosphorothioate; note = sugar modification: 2'-O-methoxyethylribose
  modified_base 6: mod_base = OTHER; note = thymine; note = sugar modification: 2'-O-methoxyethylribose; note = backbone modification: 5'-phosphorothioate
  modified_base 7: mod_base = OTHER; note = backbone modification: 5'-phosphorothioate; note = sugar modification: 2'-O-methoxyethylribose
  modified_base 8: mod_base = OTHER; note = thymine; note = backbone modification: 5'-phosphorothioate; note = sugar modification: 2'-O-methoxyethylribose
  modified_base 9: mod_base = OTHER; note = backbone modification: 5'-phosphorothioate; note = sugar modification: 2'-O-methoxyethylribose; note = thymine
  modified_base 10: mod_base = OTHER; note = backbone modification: 5'-phosphorothioate; note = sugar modification: 2'-O-methoxyethylribose
  modified_base 11: mod_base = m5c; mod_base = OTHER; note = backbone modification: 5'-phosphorothioate; note = sugar modification: 2'-O-methoxyethylribose
  modified_base 12: mod_base = OTHER; mod_base = m5c; note = backbone modification: 5'-phosphorothioate; note = sugar modification: 2'-O-methoxyethylribose
  modified_base 13: mod_base = OTHER; note = backbone modification: 5'-phosphorothioate; note = sugar modification: 2'-O-methoxyethylribose; note = thymine
  modified_base 14: mod_base = m5c; mod_base = OTHER; note = backbone modification: 5'-phosphorothioate; note = sugar modification: 2'-O-methoxyethylribose
  modified_base 15: mod_base = m5c; mod_base = OTHER; note = sugar modification: 2'-O-methoxyethylribose; note = backbone modification: 5'-phosphorothioate
  modified_base 16: mod_base = OTHER; note = sugar modification: 2'-O-methoxyethylribose; note = backbone modification: 5'-phosphorothioate
  modified_base 17: mod_base = OTHER; note = sugar modification: lna; note = backbone modification: 5'-phosphorothioate
  modified_base 18: mod_base = OTHER; note = sugar modification: lna; note = thymine
tcaactgttgcctccggt

SEQ ID NO: 440 - RNA, 18 nt, synthetic construct
  source 1..18: mol_type = other RNA; note = Antisense oligonucleotide
  modified_base 1: mod_base = OTHER; note = thymine; note = sugar modification: lna; note = backbone modification: 5'-phosphorothioate
  modified_base 2: mod_base = OTHER; note = thymine; note = sugar modification: lna; note = backbone modification: 5'-phosphorothioate
  modified_base 3: mod_base = m5c; mod_base = OTHER; note = backbone modification: 5'-phosphorothioate; note = sugar modification: 2'-O-methoxyethylribose
  modified_base 4: mod_base = OTHER; note = backbone modification: 5'-phosphorothioate; note = sugar modification: 2'-O-methoxyethylribose
  modified_base 5: mod_base = OTHER; note = sugar modification: 2'-O-methoxyethylribose; note = backbone modification: 5'-phosphorothioate
  modified_base 6: mod_base = m5c; mod_base = OTHER; note = sugar modification: 2'-O-methoxyethylribose; note = backbone modification: 5'-phosphorothioate
  modified_base 7: mod_base = OTHER; note = thymine; note = backbone modification: 5'-phosphorothioate; note = sugar modification: 2'-O-methoxyethylribose
  modified_base 8: mod_base = OTHER; note = backbone modification: 5'-phosphorothioate; note = sugar modification: 2'-O-methoxyethylribose
  modified_base 9: mod_base = OTHER; note = sugar modification: 2'-O-methoxyethylribose; note = thymine; note = backbone modification: 5'-phosphorothioate
  modified_base 10: mod_base = OTHER; note = sugar modification: 2'-O-methoxyethylribose; note = backbone modification: 5'-phosphorothioate; note = thymine
  modified_base 11: mod_base = OTHER; note = backbone modification: 5'-phosphorothioate; note = sugar modification: 2'-O-methoxyethylribose
  modified_base 12: mod_base = m5c; mod_base = OTHER; note = sugar modification: 2'-O-methoxyethylribose; note = backbone modification: 5'-phosphorothioate
  modified_base 13: mod_base = m5c; mod_base = OTHER; note = backbone modification: 5'-phosphorothioate; note = sugar modification: 2'-O-methoxyethylribose
  modified_base 14: mod_base = OTHER; note = sugar modification: 2'-O-methoxyethylribose; note = thymine; note = backbone modification: 5'-phosphorothioate
  modified_base 15: mod_base = OTHER; mod_base = m5c; note = backbone modification: 5'-phosphorothioate; note = sugar modification: 2'-O-methoxyethylribose
  modified_base 16: mod_base = m5c; mod_base = OTHER; note = backbone modification: 5'-phosphorothioate; note = sugar modification: 2'-O-methoxyethylribose
  modified_base 17: mod_base = OTHER; note = backbone modification: 5'-phosphorothioate; note = sugar modification: lna
  modified_base 18: mod_base = OTHER; note = sugar modification: lna
ttcaactgttgcctccgg

SEQ ID NO: 441 - RNA, 18 nt, synthetic construct
  source 1..18: mol_type = other RNA; note = Antisense oligonucleotide
  modified_base 1: mod_base = OTHER; note = backbone modification: 5'-phosphorothioate; note = sugar modification: lna
  modified_base 2: mod_base = OTHER; note = thymine; note = sugar modification: lna; note = backbone modification: 5'-phosphorothioate
  modified_base 3: mod_base = OTHER; note = thymine; note = backbone modification: 5'-phosphorothioate; note = sugar modification: 2'-O-methoxyethylribose
  modified_base 4: mod_base = OTHER; mod_base = m5c; note = sugar modification: 2'-O-methoxyethylribose; note = backbone modification: 5'-phosphorothioate
  modified_base 5: mod_base = OTHER; note = backbone modification: 5'-phosphorothioate; note = sugar modification: 2'-O-methoxyethylribose
  modified_base 6: mod_base = OTHER; note = backbone modification: 5'-phosphorothioate; note = sugar modification: 2'-O-methoxyethylribose
  modified_base 7: mod_base = OTHER; mod_base = m5c; note = backbone modification: 5'-phosphorothioate; note = sugar modification: 2'-O-methoxyethylribose
  modified_base 8: mod_base = OTHER; note = thymine; note = backbone modification: 5'-phosphorothioate; note = sugar modification: 2'-O-methoxyethylribose
  modified_base 9: mod_base = OTHER; note = backbone modification: 5'-phosphorothioate; note = sugar modification: 2'-O-methoxyethylribose
  modified_base 10: mod_base = OTHER; note = sugar modification: 2'-O-methoxyethylribose; note = thymine; note = backbone modification: 5'-phosphorothioate
  modified_base 11: mod_base = OTHER; note = backbone modification: 5'-phosphorothioate; note = sugar modification: 2'-O-methoxyethylribose; note = thymine
  modified_base 12: mod_base = OTHER; note = backbone modification: 5'-phosphorothioate; note = sugar modification: 2'-O-methoxyethylribose
  modified_base 13: mod_base = OTHER; mod_base = m5c; note = sugar modification: 2'-O-methoxyethylribose; note = backbone modification: 5'-phosphorothioate
  modified_base 14: mod_base = m5c; mod_base = OTHER; note = sugar modification: 2'-O-methoxyethylribose; note = backbone modification: 5'-phosphorothioate
  modified_base 15: mod_base = OTHER; note = thymine; note = sugar modification: 2'-O-methoxyethylribose; note = backbone modification: 5'-phosphorothioate
  modified_base 16: mod_base = m5c; mod_base = OTHER; note = sugar modification: 2'-O-methoxyethylribose; note = backbone modification: 5'-phosphorothioate
  modified_base 17: mod_base = m5c; mod_base = OTHER; note = sugar modification: lna; note = backbone modification: 5'-phosphorothioate
  modified_base 18: mod_base = OTHER; note = sugar modification: lna
attcaactgttgcctccg

SEQ ID NO: 442 - RNA, 18 nt, synthetic construct
  source 1..18: mol_type = other RNA; note = Antisense oligonucleotide
  modified_base 1: mod_base = OTHER; mod_base = m5c; note = sugar modification: lna; note = backbone modification: 5'-phosphorothioate
  modified_base 2: mod_base = OTHER; note = sugar modification: lna; note = backbone modification: 5'-phosphorothioate
  modified_base 3: mod_base = OTHER; note = sugar modification: 2'-O-methoxyethylribose; note = backbone modification: 5'-phosphorothioate; note = thymine
  modified_base 4: mod_base = OTHER; note = backbone modification: 5'-phosphorothioate; note = sugar modification: 2'-O-methoxyethylribose; note = thymine
  modified_base 5: mod_base = m5c; mod_base = OTHER; note = backbone modification: 5'-phosphorothioate; note = sugar modification: 2'-O-methoxyethylribose
  modified_base 6: mod_base = OTHER; note = backbone modification: 5'-phosphorothioate; note = sugar modification: 2'-O-methoxyethylribose
  modified_base 7: mod_base = OTHER; note = sugar modification: 2'-O-methoxyethylribose; note = backbone modification: 5'-phosphorothioate
  modified_base 8: mod_base = OTHER; mod_base = m5c; note = sugar modification: 2'-O-methoxyethylribose; note = backbone modification: 5'-phosphorothioate
  modified_base 9: mod_base = OTHER; note = sugar modification: 2'-O-methoxyethylribose; note = backbone modification: 5'-phosphorothioate; note = thymine
  modified_base 10: mod_base = OTHER; note = backbone modification: 5'-phosphorothioate; note = sugar modification: 2'-O-methoxyethylribose
  modified_base 11: mod_base = OTHER; note = sugar modification: 2'-O-methoxyethylribose; note = backbone modification: 5'-phosphorothioate; note = thymine
  modified_base 12: mod_base = OTHER; note = backbone modification: 5'-phosphorothioate; note = sugar modification: 2'-O-methoxyethylribose; note = thymine
  modified_base 13: mod_base = OTHER; note = sugar modification: 2'-O-methoxyethylribose; note = backbone modification: 5'-phosphorothioate
  modified_base 14: mod_base = OTHER; mod_base = m5c; note = backbone modification: 5'-phosphorothioate; note = sugar modification: 2'-O-methoxyethylribose
  modified_base 15: mod_base = OTHER; mod_base = m5c; note = backbone modification: 5'-phosphorothioate; note = sugar modification: 2'-O-methoxyethylribose
  modified_base 16: mod_base = OTHER; note = thymine; note = sugar modification: 2'-O-methoxyethylribose; note = backbone modification: 5'-phosphorothioate
  modified_base 17: mod_base = OTHER; mod_base = m5c; note = sugar modification: lna; note = backbone modification: 5'-phosphorothioate
  modified_base 18: mod_base = m5c; mod_base = OTHER; note = sugar modification: lna
cattcaactgttgcctcc

SEQ ID NO: 443 - RNA, 18 nt, synthetic construct
  source 1..18: mol_type = other RNA; note = Antisense oligonucleotide
  modified_base 1: mod_base = OTHER; note = sugar modification: lna; note = thymine; note = backbone modification: 5'-phosphorothioate
  modified_base 2: mod_base = m5c; mod_base = OTHER; note = sugar modification: lna; note = backbone modification: 5'-phosphorothioate
  modified_base 3: mod_base = OTHER; note = sugar modification: 2'-O-methoxyethylribose; note = backbone modification: 5'-phosphorothioate
  modified_base 4: mod_base = OTHER; note = sugar modification: 2'-O-methoxyethylribose; note = thymine; note = backbone modification: 5'-phosphorothioate
  modified_base 5: mod_base = OTHER; note = backbone modification: 5'-phosphorothioate; note = thymine; note = sugar modification: 2'-O-methoxyethylribose
  modified_base 6: mod_base = OTHER; mod_base = m5c; note = sugar modification: 2'-O-methoxyethylribose; note = backbone modification: 5'-phosphorothioate
  modified_base 7: mod_base = OTHER; note = backbone modification: 5'-phosphorothioate; note = sugar modification: 2'-O-methoxyethylribose
  modified_base 8: mod_base = OTHER; note = sugar modification: 2'-O-methoxyethylribose; note = backbone modification: 5'-phosphorothioate
  modified_base 9: mod_base = m5c; mod_base = OTHER; note = backbone modification: 5'-phosphorothioate; note = sugar modification: 2'-O-methoxyethylribose
  modified_base 10: mod_base = OTHER; note = sugar modification: 2'-O-methoxyethylribose; note = thymine; note = backbone modification: 5'-phosphorothioate
  modified_base 11: mod_base = OTHER; note = sugar modification: 2'-O-methoxyethylribose; note = backbone modification: 5'-phosphorothioate
  modified_base 12: mod_base = OTHER; note = sugar modification: 2'-O-methoxyethylribose; note = backbone modification: 5'-phosphorothioate; note = thymine
  modified_base 13: mod_base = OTHER; note = backbone modification: 5'-phosphorothioate; note = sugar modification: 2'-O-methoxyethylribose; note = thymine
  modified_base 14: mod_base = OTHER; note = backbone modification: 5'-phosphorothioate; note = sugar modification: 2'-O-methoxyethylribose
  modified_base 15: mod_base = OTHER; mod_base = m5c; note = backbone modification: 5'-phosphorothioate; note = sugar modification: 2'-O-methoxyethylribose
  modified_base 16: mod_base = OTHER; mod_base = m5c; note = sugar modification: 2'-O-methoxyethylribose; note = backbone modification: 5'-phosphorothioate
  modified_base 17: mod_base = OTHER; note = backbone modification: 5'-phosphorothioate; note = thymine; note = sugar modification: lna
  modified_base 18: mod_base = OTHER; mod_base = m5c; note = sugar modification: lna
tcattcaactgttgcctc

SEQ ID NO: 444 - RNA, 18 nt, synthetic construct
  source 1..18: mol_type = other RNA; note = Antisense oligonucleotide
  modified_base 1: mod_base = OTHER; note = sugar modification: lna; note = backbone modification: 5'-phosphorothioate; note = thymine
  modified_base 2: mod_base = OTHER; note = backbone modification: 5'-phosphorothioate; note = sugar modification: lna; note = thymine
  modified_base 3: mod_base = m5c; mod_base = OTHER; note = sugar modification: 2'-O-methoxyethylribose; note = backbone modification: 5'-phosphorothioate
  modified_base 4: mod_base = OTHER; note = backbone modification: 5'-phosphorothioate; note = sugar modification: 2'-O-methoxyethylribose
  modified_base 5: mod_base = OTHER; note = sugar modification: 2'-O-methoxyethylribose; note = thymine; note = backbone modification: 5'-phosphorothioate
  modified_base 6: mod_base = OTHER; note = backbone modification: 5'-phosphorothioate; note = sugar modification: 2'-O-methoxyethylribose; note = thymine
  modified_base 7: mod_base = m5c; mod_base = OTHER; note = sugar modification: 2'-O-methoxyethylribose; note = backbone modification: 5'-phosphorothioate
  modified_base 8: mod_base = OTHER; note = backbone modification: 5'-phosphorothioate; note = sugar modification: 2'-O-methoxyethylribose
  modified_base 9: mod_base = OTHER; note = sugar modification: 2'-O-methoxyethylribose; note = backbone modification: 5'-phosphorothioate
  modified_base 10: mod_base = OTHER; mod_base = m5c; note = sugar modification: 2'-O-methoxyethylribose; note = backbone modification: 5'-phosphorothioate
  modified_base 11: mod_base = OTHER; note = thymine; note = backbone modification: 5'-phosphorothioate; note = sugar modification: 2'-O-methoxyethylribose
  modified_base 12: mod_base = OTHER; note = backbone modification: 5'-phosphorothioate; note = sugar modification: 2'-O-methoxyethylribose
  modified_base 13: mod_base = OTHER; note = backbone modification: 5'-phosphorothioate; note = thymine; note = sugar modification: 2'-O-methoxyethylribose
  modified_base 14: mod_base = OTHER; note = backbone modification: 5'-phosphorothioate; note = sugar modification: 2'-O-methoxyethylribose; note = thymine
  modified_base 15: mod_base = OTHER; note = sugar modification: 2'-O-methoxyethylribose; note = backbone modification: 5'-phosphorothioate
  modified_base 16: mod_base = OTHER; mod_base = m5c; note = sugar modification: 2'-O-methoxyethylribose; note = backbone modification: 5'-phosphorothioate
  modified_base 17: mod_base = OTHER; mod_base = m5c; note = backbone modification: 5'-phosphorothioate; note = sugar modification: lna
  modified_base 18: mod_base = OTHER; note = thymine; note = sugar modification: lna
ttcattcaactgttgcct

SEQ ID NO: 445 - RNA, 18 nt, synthetic construct
  source 1..18: mol_type = other RNA; note = Antisense oligonucleotide
  modified_base 1: mod_base = OTHER; note = sugar modification: lna; note = backbone modification: 5'-phosphorothioate; note = thymine
  modified_base 2: mod_base = OTHER; note = sugar modification: lna; note = backbone modification: 5'-phosphorothioate; note = thymine
  modified_base 3: mod_base = OTHER; note = sugar modification: 2'-O-methoxyethylribose; note = thymine; note = backbone modification: 5'-phosphorothioate
  modified_base 4: mod_base = OTHER; mod_base = m5c; note = sugar modification: 2'-O-methoxyethylribose; note = backbone modification: 5'-phosphorothioate
  modified_base 5: mod_base = OTHER; note = backbone modification: 5'-phosphorothioate; note = sugar modification: 2'-O-methoxyethylribose
  modified_base 6: mod_base = OTHER; note = thymine; note = sugar modification: 2'-O-methoxyethylribose; note = backbone modification: 5'-phosphorothioate
  modified_base 7: mod_base = OTHER; note = sugar modification: 2'-O-methoxyethylribose; note = backbone modification: 5'-phosphorothioate; note = thymine
  modified_base 8: mod_base = m5c; mod_base = OTHER; note = backbone modification: 5'-phosphorothioate; note = sugar modification: 2'-O-methoxyethylribose
  modified_base 9: mod_base = OTHER; note = backbone modification: 5'-phosphorothioate; note = sugar modification: 2'-O-methoxyethylribose
  modified_base 10: mod_base = OTHER; note = sugar modification: 2'-O-methoxyethylribose; note = backbone modification: 5'-phosphorothioate
  modified_base 11: mod_base = OTHER; mod_base = m5c; note = sugar modification: 2'-O-methoxyethylribose; note = backbone modification: 5'-phosphorothioate
  modified_base 12: mod_base = OTHER; note = thymine; note = sugar modification: 2'-O-methoxyethylribose; note = backbone modification: 5'-phosphorothioate
  modified_base 13: mod_base = OTHER; note = sugar modification: 2'-O-methoxyethylribose; note = backbone modification: 5'-phosphorothioate
  modified_base 14: mod_base = OTHER; note = thymine; note = backbone modification: 5'-phosphorothioate; note = sugar modification: 2'-O-methoxyethylribose
  modified_base 15: mod_base = OTHER; note = thymine; note = backbone modification: 5'-phosphorothioate; note = sugar modification: 2'-O-methoxyethylribose
  modified_base 16: mod_base = OTHER; note = sugar modification: 2'-O-methoxyethylribose; note = backbone modification: 5'-phosphorothioate
  modified_base 17: mod_base = OTHER; mod_base = m5c; note = sugar modification: lna; note = backbone modification: 5'-phosphorothioate
  modified_base 18: mod_base = m5c; mod_base = OTHER; note = sugar modification: lna
tttcattcaactgttgcc

SEQ ID NO: 446 - RNA, 18 nt, synthetic construct
  source 1..18: mol_type = other RNA; note = Antisense oligonucleotide
  modified_base 1: mod_base = OTHER; note = sugar modification: lna; note = backbone modification: 5'-phosphorothioate
  modified_base 2: mod_base = OTHER; note = backbone modification: 5'-phosphorothioate; note = sugar modification: lna; note = thymine
  modified_base 3: mod_base = OTHER; note = thymine; note = sugar modification: 2'-O-methoxyethylribose; note = backbone modification: 5'-phosphorothioate
  modified_base 4: mod_base = OTHER; note = backbone modification: 5'-phosphorothioate; note = sugar modification: 2'-O-methoxyethylribose; note = thymine
  modified_base 5: mod_base = OTHER; mod_base = m5c; note = backbone modification: 5'-phosphorothioate; note = sugar modification: 2'-O-methoxyethylribose
  modified_base 6: mod_base = OTHER; note = sugar modification: 2'-O-methoxyethylribose; note = backbone modification: 5'-phosphorothioate
  modified_base 7: mod_base = OTHER; note = backbone modification: 5'-phosphorothioate; note = sugar modification: 2'-O-methoxyethylribose; note = thymine
  modified_base 8: mod_base = OTHER; note = thymine; note = sugar modification: 2'-O-methoxyethylribose; note = backbone modification: 5'-phosphorothioate
  modified_base 9: mod_base = OTHER; mod_base = m5c; note = sugar modification: 2'-O-methoxyethylribose; note = backbone modification: 5'-phosphorothioate
  modified_base 10: mod_base = OTHER; note = backbone modification: 5'-phosphorothioate; note = sugar modification: 2'-O-methoxyethylribose
  modified_base 11: mod_base = OTHER; note = sugar modification: 2'-O-methoxyethylribose; note = backbone modification: 5'-phosphorothioate
  modified_base 12: mod_base = m5c; mod_base = OTHER; note = sugar modification: 2'-O-methoxyethylribose; note = backbone modification: 5'-phosphorothioate
  modified_base 13: mod_base = OTHER; note = backbone modification: 5'-phosphorothioate; note = thymine; note = sugar modification: 2'-O-methoxyethylribose
  modified_base 14: mod_base = OTHER; note = backbone modification: 5'-phosphorothioate; note = sugar modification: 2'-O-methoxyethylribose
  modified_base 15: mod_base = OTHER; note = sugar modification: 2'-O-methoxyethylribose; note = thymine; note = backbone modification: 5'-phosphorothioate
  modified_base 16: mod_base = OTHER; note = thymine; note = sugar modification: 2'-O-methoxyethylribose; note = backbone modification: 5'-phosphorothioate
  modified_base 17: mod_base = OTHER; note = sugar modification: lna; note = backbone modification: 5'-phosphorothioate
  modified_base 18: mod_base = OTHER; mod_base = m5c; note = sugar modification: lna
atttcattcaactgttgc

SEQ ID NO: 447 - RNA, 18 nt, synthetic construct
  source 1..18: mol_type = other RNA; note = Antisense oligonucleotide
  modified_base 1: mod_base = m5c; mod_base = OTHER; note = sugar modification: lna; note = backbone modification: 5'-phosphorothioate
  modified_base 2: mod_base = OTHER; note = backbone modification: 5'-phosphorothioate; note = sugar modification: lna
  modified_base 3: mod_base = OTHER; note = thymine; note = sugar modification: 2'-O-methoxyethylribose; note = backbone modification: 5'-phosphorothioate
  modified_base 4: mod_base = OTHER; note = thymine; note = backbone modification: 5'-phosphorothioate; note = sugar modification: 2'-O-methoxyethylribose
  modified_base 5: mod_base = OTHER; note = backbone modification: 5'-phosphorothioate; note = sugar modification: 2'-O-methoxyethylribose; note = thymine
  modified_base 6: mod_base = OTHER; mod_base = m5c; note = sugar modification: 2'-O-methoxyethylribose; note = backbone modification: 5'-phosphorothioate
  modified_base 7: mod_base = OTHER; note = sugar modification: 2'-O-methoxyethylribose; note = backbone modification: 5'-phosphorothioate
  modified_base 8: mod_base = OTHER; note = thymine; note = backbone modification: 5'-phosphorothioate; note = sugar modification: 2'-O-methoxyethylribose
  modified_base 9: mod_base = OTHER; note = thymine; note = backbone modification: 5'-phosphorothioate; note = sugar modification: 2'-O-methoxyethylribose
  modified_base 10: mod_base = m5c; mod_base = OTHER; note = backbone modification: 5'-phosphorothioate; note = sugar modification: 2'-O-methoxyethylribose
  modified_base 11: mod_base = OTHER; note = backbone modification: 5'-phosphorothioate; note = sugar modification: 2'-O-methoxyethylribose
  modified_base 12: mod_base = OTHER; note = backbone modification: 5'-phosphorothioate; note = sugar modification: 2'-O-methoxyethylribose
  modified_base 13: mod_base = OTHER; mod_base = m5c; note = backbone modification: 5'-phosphorothioate; note = sugar modification: 2'-O-methoxyethylribose
  modified_base 14: mod_base = OTHER; note = sugar modification: 2'-O-methoxyethylribose; note = backbone modification: 5'-phosphorothioate; note = thymine
  modified_base 15: mod_base = OTHER; note = sugar modification: 2'-O-methoxyethylribose; note = backbone modification: 5'-phosphorothioate
  modified_base 16: mod_base = OTHER; note = thymine; note = backbone modification: 5'-phosphorothioate; note = sugar modification: 2'-O-methoxyethylribose
  modified_base 17: mod_base = OTHER; note = thymine; note = backbone modification: 5'-phosphorothioate; note = sugar modification: lna
  modified_base 18: mod_base = OTHER; note = sugar modification: lna
catttcattcaactgttg

SEQ ID NO: 448 - RNA, 18 nt, synthetic construct
  source 1..18: mol_type = other RNA; note = Antisense oligonucleotide
  modified_base 1: mod_base = OTHER; note = backbone modification: 5'-phosphorothioate; note = sugar modification: lna
  modified_base 2: mod_base = m5c; mod_base = OTHER; note = sugar modification: lna; note = backbone modification: 5'-phosphorothioate
  modified_base 3: mod_base = OTHER; note = backbone modification: 5'-phosphorothioate; note = sugar modification: 2'-O-methoxyethylribose
  modified_base 4: mod_base = OTHER; note = sugar modification: 2'-O-methoxyethylribose; note = backbone modification: 5'-phosphorothioate; note = thymine
  modified_base 5: mod_base = OTHER; note = backbone modification: 5'-phosphorothioate; note = thymine; note = sugar modification: 2'-O-methoxyethylribose
  modified_base 6: mod_base = OTHER; note = backbone modification: 5'-phosphorothioate; note = thymine; note = sugar modification: 2'-O-methoxyethylribose
  modified_base 7: mod_base = m5c; mod_base = OTHER; note = backbone modification: 5'-phosphorothioate; note = sugar modification: 2'-O-methoxyethylribose
  modified_base 8: mod_base = OTHER; note = backbone modification: 5'-phosphorothioate; note = sugar modification: 2'-O-methoxyethylribose
  modified_base 9: mod_base = OTHER; note = sugar modification: 2'-O-methoxyethylribose; note = thymine; note = backbone modification: 5'-phosphorothioate
  modified_base 10: mod_base = OTHER; note = thymine; note = sugar modification: 2'-O-methoxyethylribose; note = backbone modification: 5'-phosphorothioate
  modified_base 11: mod_base = m5c; mod_base = OTHER; note = backbone modification: 5'-phosphorothioate; note = sugar modification: 2'-O-methoxyethylribose
  modified_base 12: mod_base = OTHER; note = sugar modification: 2'-O-methoxyethylribose; note = backbone modification: 5'-phosphorothioate
  modified_base 13: mod_base = OTHER; note = backbone modification: 5'-phosphorothioate; note = sugar modification: 2'-O-methoxyethylribose
  modified_base 14: mod_base = m5c; mod_base = OTHER; note = sugar modification: 2'-O-methoxyethylribose; note = backbone modification: 5'-phosphorothioate
  modified_base 15: mod_base = OTHER; note = sugar modification: 2'-O-methoxyethylribose; note = backbone modification: 5'-phosphorothioate; note = thymine
  modified_base 16: mod_base = OTHER; note = sugar modification: 2'-O-methoxyethylribose; note = backbone modification: 5'-phosphorothioate
  modified_base 17: mod_base = OTHER; note = thymine; note = backbone modification: 5'-phosphorothioate; note = sugar modification: lna
  modified_base 18: mod_base = OTHER; note = thymine; note = sugar modification: lna
acatttcattcaactgtt

SEQ ID NO: 449 - RNA, 14 nt, synthetic construct
  source 1..14: mol_type = other RNA; note = Antisense oligonucleotide
  modified_base 1: mod_base = OTHER; note = sugar modification: 2'-O-methoxyethylribose; note = backbone modification: 5'-phosphorothioate
  modified_base 2: mod_base = OTHER; note = sugar modification: 2'-O-methoxyethylribose; note = backbone modification: 5'-phosphorothioate
  modified_base 3: mod_base = OTHER; note = thymine; note = sugar modification: 2'-O-methoxyethylribose; note = backbone modification: 5'-phosphorothioate
  modified_base 4: mod_base = OTHER; note = backbone modification: 5'-phosphorothioate; note = sugar modification: 2'-O-methoxyethylribose
  modified_base 5: mod_base = OTHER; note = thymine; note = sugar modification: 2'-O-methoxyethylribose; note = backbone modification: 5'-phosphorothioate
  modified_base 6: mod_base = OTHER; note = thymine; note = sugar modification: 2'-O-methoxyethylribose; note = backbone modification: 5'-phosphorothioate
  modified_base 7: mod_base = OTHER; mod_base = m5c; note = backbone modification: 5'-phosphorothioate; note = sugar modification: 2'-O-methoxyethylribose
  modified_base 8: mod_base = OTHER; note = sugar modification: 2'-O-methoxyethylribose; note = backbone modification: 5'-phosphorothioate; note = thymine
  modified_base 9: mod_base = OTHER; note = thymine; note = backbone modification: 5'-phosphorothioate; note = sugar modification: 2'-O-methoxyethylribose
  modified_base 10: mod_base = OTHER; note = backbone modification: 5'-phosphorothioate; note = sugar modification: 2'-O-methoxyethylribose
  modified_base 11: mod_base = OTHER; note = sugar modification: 2'-O-methoxyethylribose; note = thymine; note = backbone modification: 5'-phosphorothioate
  modified_base 12: mod_base = OTHER; note = sugar modification: 2'-O-methoxyethylribose; note = backbone modification: 5'-phosphorothioate
  modified_base 13: mod_base = m5c; mod_base = OTHER; note = sugar modification: 2'-O-methoxyethylribose; note = backbone modification: 5'-phosphorothioate
  modified_base 14: mod_base = OTHER; note = sugar modification: 2'-O-methoxyethylribose; note = thymine
ggtgttcttgtact

SEQ ID NO: 450 - RNA, 14 nt, synthetic construct
  source 1..14: mol_type = other RNA; note = Antisense oligonucleotide
  modified_base 1: mod_base = OTHER; note = backbone modification: 5'-phosphorothioate; note = sugar modification: 2'-O-methoxyethylribose; note = thymine
  modified_base 2: mod_base = OTHER; note = sugar modification: 2'-O-methoxyethylribose; note = thymine; note = backbone modification: 5'-phosphorothioate
  modified_base 3: mod_base = OTHER; mod_base = m5c; note = backbone modification: 5'-phosphorothioate; note = sugar modification: 2'-O-methoxyethylribose
  modified_base 4: mod_base = OTHER; note = backbone modification: 5'-phosphorothioate; note = thymine; note = sugar modification: 2'-O-methoxyethylribose
  modified_base 5: mod_base = OTHER; note = backbone modification: 5'-phosphorothioate; note = thymine; note = sugar modification: 2'-O-methoxyethylribose
  modified_base 6: mod_base = OTHER; note = sugar modification: 2'-O-methoxyethylribose; note = backbone modification: 5'-phosphorothioate
  modified_base 7: mod_base = OTHER; note = sugar modification: 2'-O-methoxyethylribose; note = thymine; note = backbone modification: 5'-phosphorothioate
  modified_base 8: mod_base = OTHER; note = backbone modification: 5'-phosphorothioate; note = sugar modification: 2'-O-methoxyethylribose
  modified_base 9: mod_base = m5c; mod_base = OTHER; note = backbone modification: 5'-phosphorothioate; note = sugar modification: 2'-O-methoxyethylribose
  modified_base 10: mod_base = OTHER; note = thymine; note = sugar modification: 2'-O-methoxyethylribose; note = backbone modification: 5'-phosphorothioate
  modified_base 11: mod_base = OTHER; note = sugar modification: 2'-O-methoxyethylribose; note = backbone modification: 5'-phosphorothioate; note = thymine
  modified_base 12: mod_base = OTHER; mod_base = m5c; note = sugar modification: 2'-O-methoxyethylribose; note = backbone modification: 5'-phosphorothioate
  modified_base 13: mod_base = OTHER; note = sugar modification: 2'-O-methoxyethylribose; note = backbone modification: 5'-phosphorothioate
  modified_base 14: mod_base = OTHER; note = thymine; note = sugar modification: 2'-O-methoxyethylribose
ttcttgtacttcat

SEQ ID NO: 451 - RNA, 14 nt, synthetic construct
  source 1..14: mol_type = other RNA; note = Antisense oligonucleotide
  modified_base 1: mod_base = OTHER; note = sugar modification: 2'-O-methoxyethylribose; note = backbone modification: 5'-phosphorothioate; note = thymine
  modified_base 2: mod_base = OTHER; note = sugar modification: 2'-O-methoxyethylribose; note = backbone modification: 5'-phosphorothioate
  modified_base 3: mod_base = OTHER; note = backbone modification: 5'-phosphorothioate; note = thymine; note = sugar modification: 2'-O-methoxyethylribose
  modified_base 4: mod_base = OTHER; note = backbone modification: 5'-phosphorothioate; note = sugar modification: 2'-O-methoxyethylribose; note = thymine
  modified_base 5: mod_base = OTHER; mod_base = m5c; note = sugar modification: 2'-O-methoxyethylribose; note = backbone modification: 5'-phosphorothioate
  modified_base 6: mod_base = OTHER; note = backbone modification: 5'-phosphorothioate; note = thymine; note = sugar modification: 2'-O-methoxyethylribose
  modified_base 7: mod_base = OTHER; note = backbone modification: 5'-phosphorothioate; note = thymine; note = sugar modification: 2'-O-methoxyethylribose
  modified_base 8: mod_base = OTHER; note = backbone modification: 5'-phosphorothioate; note = sugar modification: 2'-O-methoxyethylribose
  modified_base 9: mod_base = OTHER; note = backbone modification: 5'-phosphorothioate; note = thymine; note = sugar modification: 2'-O-methoxyethylribose
  modified_base 10: mod_base = OTHER; note = sugar modification: 2'-O-methoxyethylribose; note = backbone modification: 5'-phosphorothioate
  modified_base 11: mod_base = m5c; mod_base = OTHER; note = sugar modification: 2'-O-methoxyethylribose; note = backbone modification: 5'-phosphorothioate
  modified_base 12: mod_base = OTHER; note = sugar modification: 2'-O-methoxyethylribose; note = backbone modification: 5'-phosphorothioate; note = thymine
  modified_base 13: mod_base = OTHER; note = backbone modification: 5'-phosphorothioate; note = thymine; note = sugar modification: 2'-O-methoxyethylribose
  modified_base 14: mod_base = OTHER; mod_base = m5c; note = sugar modification: 2'-O-methoxyethylribose
tgttcttgtacttc

SEQ ID NO: 452 - RNA, 16 nt, synthetic construct
  source 1..16: mol_type = other RNA; note = Antisense oligonucleotide
  modified_base 1: mod_base = OTHER; note = backbone modification: 5'-phosphorothioate; note = sugar modification: 2'-O-methoxyethylribose
  modified_base 2: mod_base = OTHER; note = sugar modification: 2'-O-methoxyethylribose; note = backbone modification: 5'-phosphorothioate
  modified_base 3: mod_base = OTHER; note = sugar modification: 2'-O-methoxyethylribose; note = backbone modification: 5'-phosphorothioate; note = thymine
  modified_base 4: mod_base = OTHER; note = backbone modification: 5'-phosphorothioate; note = sugar modification: 2'-O-methoxyethylribose
  modified_base 5: mod_base = OTHER; note = backbone modification: 5'-phosphorothioate; note = thymine; note = sugar modification: 2'-O-methoxyethylribose
  modified_base 6: mod_base = OTHER; note = thymine; note = backbone modification: 5'-phosphorothioate; note = sugar modification: 2'-O-methoxyethylribose
  modified_base 7: mod_base = m5c; mod_base = OTHER; note = sugar modification: 2'-O-methoxyethylribose; note = backbone modification: 5'-phosphorothioate
  modified_base 8: mod_base = OTHER; note = sugar modification: 2'-O-methoxyethylribose; note = backbone modification: 5'-phosphorothioate; note = thymine
  modified_base 9: mod_base = OTHER; note = backbone modification: 5'-phosphorothioate; note = thymine; note = sugar modification: 2'-O-methoxyethylribose
  modified_base 10: mod_base = OTHER; note = backbone modification: 5'-phosphorothioate; note = sugar modification: 2'-O-methoxyethylribose
  modified_base 11: mod_base = OTHER; note = sugar modification: 2'-O-methoxyethylribose; note = thymine; note = backbone modification: 5'-phosphorothioate
  modified_base 12: mod_base = OTHER; note = sugar modification: 2'-O-methoxyethylribose; note = backbone modification: 5'-phosphorothioate
  modified_base 13: mod_base = OTHER; mod_base = m5c; note = backbone modification: 5'-phosphorothioate; note = sugar modification: 2'-O-methoxyethylribose
  modified_base 14: mod_base = OTHER; note = thymine; note = backbone modification: 5'-phosphorothioate; note = sugar modification: 2'-O-methoxyethylribose
  modified_base 15: mod_base = OTHER; note = thymine; note = sugar modification: 2'-O-methoxyethylribose; note = backbone modification: 5'-phosphorothioate
  modified_base 16: mod_base = m5c; mod_base = OTHER; note = sugar modification: 2'-O-methoxyethylribose
ggtgttcttgtacttc

SEQ ID NO: 453 - RNA, 16 nt, synthetic construct
  source 1..16: mol_type = other RNA; note = Antisense oligonucleotide
  modified_base 1: mod_base = OTHER; note = sugar modification: 2'-O-methoxyethylribose; note = backbone modification: 5'-phosphorothioate; note = thymine
  modified_base 2: mod_base = OTHER; note = backbone modification: 5'-phosphorothioate; note = sugar modification: 2'-O-methoxyethylribose
  modified_base 3: mod_base = OTHER; note = thymine; note = sugar modification: 2'-O-methoxyethylribose; note = backbone modification: 5'-phosphorothioate
  modified_base 4: mod_base = OTHER; note = sugar modification: 2'-O-methoxyethylribose; note = backbone modification: 5'-phosphorothioate; note = thymine
  modified_base 5: mod_base = m5c; mod_base = OTHER; note = backbone modification: 5'-phosphorothioate; note = sugar modification: 2'-O-methoxyethylribose
  modified_base 6: mod_base = OTHER; note = sugar modification: 2'-O-methoxyethylribose; note = backbone modification: 5'-phosphorothioate; note = thymine
  modified_base 7: mod_base = OTHER; note = sugar modification: 2'-O-methoxyethylribose; note = thymine; note = backbone modification: 5'-phosphorothioate
  modified_base 8: mod_base = OTHER; note = backbone modification: 5'-phosphorothioate; note = sugar modification: 2'-O-methoxyethylribose
  modified_base 9: mod_base = OTHER; note = thymine; note = sugar modification: 2'-O-methoxyethylribose; note = backbone modification: 5'-phosphorothioate
  modified_base 10: mod_base = OTHER; note = sugar modification: 2'-O-methoxyethylribose; note = backbone modification: 5'-phosphorothioate
  modified_base 11: mod_base = m5c; mod_base = OTHER; note = backbone modification: 5'-phosphorothioate; note = sugar modification: 2'-O-methoxyethylribose
  modified_base 12: mod_base = OTHER; note = sugar modification: 2'-O-methoxyethylribose; note = backbone modification: 5'-phosphorothioate; note = thymine
  modified_base 13: mod_base = OTHER; note = thymine; note = backbone modification: 5'-phosphorothioate; note = sugar modification: 2'-O-methoxyethylribose
  modified_base 14: mod_base = OTHER; mod_base = m5c; note = sugar modification: 2'-O-methoxyethylribose; note = backbone modification: 5'-phosphorothioate
  modified_base 15: mod_base = OTHER; note = sugar modification: 2'-O-methoxyethylribose; note = backbone modification: 5'-phosphorothioate
  modified_base 16: mod_base = OTHER; note = thymine; note = sugar modification: 2'-O-methoxyethylribose
tgttcttgtacttcat

SEQ ID NO: 454 - RNA, 16 nt, synthetic construct
  source 1..16: mol_type = other RNA; note = Antisense oligonucleotide
  modified_base 1: mod_base = OTHER; note = sugar modification: 2'-O-methoxyethylribose; note = backbone modification: 5'-phosphorothioate
  modified_base 2: mod_base = OTHER; note = backbone modification: 5'-phosphorothioate; note = sugar modification: 2'-O-methoxyethylribose; note = thymine
  modified_base 3: mod_base = OTHER; note = sugar modification: 2'-O-methoxyethylribose; note = backbone modification: 5'-phosphorothioate
  modified_base 4: mod_base = OTHER; note = sugar modification: 2'-O-methoxyethylribose; note = thymine; note = backbone modification: 5'-phosphorothioate
  modified_base 5: mod_base = OTHER; note = sugar modification: 2'-O-methoxyethylribose; note = thymine; note = backbone modification: 5'-phosphorothioate
  modified_base 6: mod_base = OTHER; mod_base = m5c; note = sugar modification: 2'-O-methoxyethylribose; note = backbone modification: 5'-phosphorothioate
  modified_base 7: mod_base = OTHER; note = thymine; note = backbone modification: 5'-phosphorothioate; note = sugar modification: 2'-O-methoxyethylribose
  modified_base 8: mod_base = OTHER; note = thymine; note = sugar modification: 2'-O-methoxyethylribose; note = backbone modification: 5'-phosphorothioate
  modified_base 9: mod_base = OTHER; note = backbone modification: 5'-phosphorothioate; note = sugar modification: 2'-O-methoxyethylribose
  modified_base 10: mod_base = OTHER; note = sugar modification: 2'-O-methoxyethylribose; note = thymine; note = backbone modification: 5'-phosphorothioate
  modified_base 11: mod_base = OTHER; note = sugar modification: 2'-O-methoxyethylribose; note = backbone modification: 5'-phosphorothioate
  modified_base 12: mod_base = OTHER; mod_base = m5c; note = sugar modification: 2'-O-methoxyethylribose; note = backbone modification: 5'-phosphorothioate
  modified_base 13: mod_base = OTHER; note = sugar modification: 2'-O-methoxyethylribose; note = backbone modification: 5'-phosphorothioate; note = thymine
  modified_base 14: mod_base = OTHER; note = sugar modification: 2'-O-methoxyethylribose; note = thymine; note = backbone modification: 5'-phosphorothioate
  modified_base 15: mod_base = m5c; mod_base = OTHER; note = backbone modification: 5'-phosphorothioate; note = sugar modification: 2'-O-methoxyethylribose
  modified_base 16: mod_base = OTHER; note = sugar modification: 2'-O-methoxyethylribose
gtgttcttgtacttca

SEQ ID NO: 455 - RNA, 20 nt, synthetic construct
  source 1..20: mol_type = other RNA; note = Antisense oligonucleotide
  modified_base 1: mod_base = OTHER; note = backbone modification: 5'-phosphorothioate; note = sugar modification: 2'-O-methoxyethylribose
  modified_base 2: mod_base = OTHER; note = backbone modification: 5'-phosphorothioate; note = sugar modification: 2'-O-methoxyethylribose
  modified_base 3: mod_base = OTHER; note = thymine; note = backbone modification: 5'-phosphorothioate; note = sugar modification: 2'-O-methoxyethylribose
  modified_base 4: mod_base = OTHER; note = backbone modification: 5'-phosphorothioate; note = sugar modification: 2'-O-methoxyethylribose
  modified_base 5: mod_base = OTHER; note = sugar modification: 2'-O-methoxyethylribose; note = thymine; note = backbone modification: 5'-phosphorothioate
  modified_base 6: mod_base = OTHER; note = backbone modification: 5'-phosphorothioate; note = thymine; note = sugar modification: 2'-O-methoxyethylribose
  modified_base 7: mod_base = OTHER; mod_base = m5c; note = backbone modification: 5'-phosphorothioate; note = sugar modification: 2'-O-methoxyethylribose
  modified_base 8: mod_base = OTHER; note = sugar modification: 2'-O-methoxyethylribose; note = backbone modification: 5'-phosphorothioate; note = thymine
  modified_base 9: mod_base = OTHER; note = thymine; note = sugar modification: 2'-O-methoxyethylribose; note = backbone modification: 5'-phosphorothioate
  modified_base 10: mod_base = OTHER; note = backbone modification: 5'-phosphorothioate; note = sugar modification: 2'-O-methoxyethylribose
  modified_base 11: mod_base = OTHER; note = sugar modification: 2'-O-methoxyethylribose; note = thymine; note = backbone modification: 5'-phosphorothioate
  modified_base 12: mod_base = OTHER; note = sugar modification: 2'-O-methoxyethylribose; note = backbone modification: 5'-phosphorothioate
  modified_base 13: mod_base = OTHER; mod_base = m5c; note = backbone modification: 5'-phosphorothioate; note = sugar modification: 2'-O-methoxyethylribose
  modified_base 14: mod_base = OTHER; note = backbone modification: 5'-phosphorothioate; note = thymine; note = sugar modification: 2'-O-methoxyethylribose
  modified_base 15: mod_base = OTHER; note = sugar modification: 2'-O-methoxyethylribose; note = backbone modification: 5'-phosphorothioate; note = thymine
  modified_base 16: mod_base = m5c; mod_base = OTHER; note = backbone modification: 5'-phosphorothioate; note = sugar modification: 2'-O-methoxyethylribose
  modified_base 17: mod_base = OTHER; note = sugar modification: 2'-O-methoxyethylribose; note = backbone modification: 5'-phosphorothioate
  modified_base 18: mod_base = OTHER; note = thymine; note = backbone modification: 5'-phosphorothioate; note = sugar modification: 2'-O-methoxyethylribose
  modified_base 19: mod_base = OTHER; mod_base = m5c; note = sugar modification: 2'-O-methoxyethylribose; note = backbone modification: 5'-phosphorothioate
  modified_base 20: mod_base = OTHER; mod_base = m5c; note = sugar modification: 2'-O-methoxyethylribose
ggtgttcttgtacttcatcc

SEQ ID NO: 456 - RNA, 20 nt, synthetic construct
  source 1..20: mol_type = other RNA; note = Antisense oligonucleotide
  modified_base 1: mod_base = OTHER; note = sugar modification: 2'-O-methoxyethylribose; note = backbone modification: 5'-phosphorothioate
  modified_base 2: mod_base = OTHER; note = backbone modification: 5'-phosphorothioate; note = sugar modification: 2'-O-methoxyethylribose
  modified_base 3: mod_base = OTHER; note = sugar modification: 2'-O-methoxyethylribose; note = backbone modification: 5'-phosphorothioate
  modified_base 4: mod_base = OTHER; note = sugar modification: 2'-O-methoxyethylribose; note = backbone modification: 5'-phosphorothioate
  modified_base 5: mod_base = OTHER; note = backbone modification: 5'-phosphorothioate; note = thymine; note = sugar modification: 2'-O-methoxyethylribose
  modified_base 6: mod_base = OTHER; note = backbone modification: 5'-phosphorothioate; note = sugar modification: 2'-O-methoxyethylribose
  modified_base 7: mod_base = OTHER; note = thymine; note = backbone modification: 5'-phosphorothioate; note = sugar modification: 2'-O-methoxyethylribose
  modified_base 8: mod_base = OTHER; note = sugar modification: 2'-O-methoxyethylribose; note = thymine; note = backbone modification: 5'-phosphorothioate
  modified_base 9: mod_base = OTHER; mod_base = m5c; note = backbone modification: 5'-phosphorothioate; note = sugar modification: 2'-O-methoxyethylribose
  modified_base 10: mod_base = OTHER; note = sugar modification: 2'-O-methoxyethylribose; note = thymine; note = backbone modification: 5'-phosphorothioate
  modified_base 11: mod_base = OTHER; note = sugar modification: 2'-O-methoxyethylribose; note = thymine; note = backbone modification: 5'-phosphorothioate
  modified_base 12: mod_base = OTHER; note = sugar modification: 2'-O-methoxyethylribose; note = backbone modification: 5'-phosphorothioate
  modified_base 13: mod_base = OTHER; note = thymine; note = backbone modification: 5'-phosphorothioate; note = sugar modification: 2'-O-methoxyethylribose
  modified_base 14: mod_base = OTHER; note = sugar modification: 2'-O-methoxyethylribose; note = backbone modification: 5'-phosphorothioate
  modified_base 15: mod_base = OTHER; mod_base = m5c; note = sugar modification: 2'-O-methoxyethylribose; note = backbone modification: 5'-phosphorothioate
  modified_base 16: mod_base = OTHER; note = sugar modification: 2'-O-methoxyethylribose; note = thymine; note = backbone modification: 5'-phosphorothioate
  modified_base 17: mod_base = OTHER; note = sugar modification: 2'-O-methoxyethylribose; note = backbone modification: 5'-phosphorothioate; note = thymine
  modified_base 18: mod_base = OTHER; mod_base = m5c; note = backbone modification: 5'-phosphorothioate; note = sugar modification: 2'-O-methoxyethylribose
  modified_base 19: mod_base = OTHER; note = backbone modification: 5'-phosphorothioate; note = sugar modification: 2'-O-methoxyethylribose
  modified_base 20: mod_base = OTHER; note = sugar modification: 2'-O-methoxyethylribose; note = thymine
aaggtgttcttgtacttcat

SEQ ID NO: 457 - RNA, 20 nt, synthetic construct
  source 1..20: mol_type = other RNA; note = Antisense oligonucleotide
  modified_base 1: mod_base = OTHER; note = sugar modification: 2'-O-methoxyethylribose; note = backbone modification: 5'-phosphorothioate
  modified_base 2: mod_base = OTHER; note = sugar modification: 2'-O-methoxyethylribose; note = backbone modification: 5'-phosphorothioate
  modified_base 3: mod_base = OTHER; note = backbone modification: 5'-phosphorothioate; note = sugar modification: 2'-O-methoxyethylribose
  modified_base 4: mod_base = OTHER; note = sugar modification: 2'-O-methoxyethylribose; note = backbone modification: 5'-phosphorothioate; note = thymine
  modified_base 5: mod_base = OTHER; note = backbone modification: 5'-phosphorothioate; note = sugar modification: 2'-O-methoxyethylribose
  modified_base 6: mod_base = OTHER; note = sugar modification: 2'-O-methoxyethylribose; note = backbone modification: 5'-phosphorothioate; note = thymine
  modified_base 7: mod_base = OTHER; note = backbone modification: 5'-phosphorothioate; note = thymine; note = sugar modification: 2'-O-methoxyethylribose
  modified_base 8: mod_base = OTHER; mod_base = m5c; note = backbone modification: 5'-phosphorothioate; note = sugar modification: 2'-O-methoxyethylribose
  modified_base 9: mod_base = OTHER; note = sugar modification: 2'-O-methoxyethylribose; note = backbone modification: 5'-phosphorothioate; note = thymine
  modified_base 10: mod_base = OTHER; note = backbone modification: 5'-phosphorothioate; note = sugar modification: 2'-O-methoxyethylribose; note = thymine
  modified_base 11: mod_base = OTHER; note = backbone modification: 5'-phosphorothioate; note = sugar modification: 2'-O-methoxyethylribose
  modified_base 12: mod_base = OTHER; note = sugar modification: 2'-O-methoxyethylribose; note = thymine; note = backbone modification: 5'-phosphorothioate
  modified_base 13: mod_base = OTHER; note = backbone modification: 5'-phosphorothioate; note = sugar modification: 2'-O-methoxyethylribose
  modified_base 14: mod_base = m5c; mod_base = OTHER; note = sugar modification: 2'-O-methoxyethylribose; note = backbone modification: 5'-phosphorothioate
  modified_base 15: mod_base = OTHER; note = thymine; note = backbone modification: 5'-phosphorothioate; note = sugar modification: 2'-O-methoxyethylribose
  modified_base 16: mod_base = OTHER; note = thymine; note = backbone modification: 5'-phosphorothioate; note = sugar modification: 2'-O-methoxyethylribose
  modified_base 17: mod_base = OTHER; mod_base = m5c; note = sugar modification: 2'-O-methoxyethylribose; note = backbone modification: 5'-phosphorothioate
  modified_base 18: mod_base = OTHER; note = sugar modification: 2'-O-methoxyethylribose; note = backbone modification: 5'-phosphorothioate
  modified_base 19: mod_base = OTHER; note = backbone modification: 5'-phosphorothioate; note = sugar modification: 2'-O-methoxyethylribose; note = thymine
  modified_base 20: mod_base = m5c; mod_base = OTHER; note = sugar modification: 2'-O-methoxyethylribose
aggtgttcttgtacttcatc

SEQ ID NO: 458 - RNA, 14 nt, synthetic construct
  source 1..14: mol_type = other RNA; note = Antisense oligonucleotide
  modified_base 1: mod_base = OTHER; note = backbone modification: 5'-phosphorothioate; note = sugar modification: lna
  modified_base 2: mod_base = OTHER; note = backbone modification: 5'-phosphorothioate; note = sugar modification: lna
  modified_base 3: mod_base = OTHER; note = sugar modification: 2'-O-methoxyethylribose; note = thymine; note = backbone modification: 5'-phosphorothioate
  modified_base 4: mod_base = OTHER; note = sugar modification: 2'-O-methoxyethylribose; note = backbone modification: 5'-phosphorothioate
  modified_base 5: mod_base = OTHER; note = thymine; note = backbone modification: 5'-phosphorothioate; note = sugar modification: 2'-O-methoxyethylribose
  modified_base 6: mod_base = OTHER; note = backbone modification: 5'-phosphorothioate; note = thymine; note = sugar modification: 2'-O-methoxyethylribose
  modified_base 7: mod_base = OTHER; mod_base = m5c; note = sugar modification: 2'-O-methoxyethylribose; note = backbone modification: 5'-phosphorothioate
  modified_base 8: mod_base = OTHER; note = thymine; note = sugar modification: 2'-O-methoxyethylribose; note = backbone modification: 5'-phosphorothioate
  modified_base 9: mod_base = OTHER; note = thymine; note = backbone modification: 5'-phosphorothioate; note = sugar modification: 2'-O-methoxyethylribose
  modified_base 10: mod_base = OTHER; note = sugar modification: 2'-O-methoxyethylribose; note = backbone modification: 5'-phosphorothioate
  modified_base 11: mod_base = OTHER; note = thymine; note = sugar modification: 2'-O-methoxyethylribose; note = backbone modification: 5'-phosphorothioate
  modified_base 12: mod_base = OTHER; note = sugar modification: 2'-O-methoxyethylribose; note = backbone modification: 5'-phosphorothioate
  modified_base 13: mod_base = OTHER; mod_base = m5c; note = backbone modification: 5'-phosphorothioate; note = sugar modification: lna
  modified_base 14: mod_base = OTHER; note = sugar modification: lna; note = thymine
ggtgttcttgtact

SEQ ID NO: 459 - RNA, 14 nt, synthetic construct
  source 1..14: mol_type = other RNA; note = Antisense oligonucleotide
  modified_base 1: mod_base = OTHER; note = backbone modification: 5'-phosphorothioate; note = sugar modification: lna; note = thymine
  modified_base 2: mod_base = OTHER; note = backbone modification: 5'-phosphorothioate; note = sugar modification: lna; note = thymine
  modified_base 3: mod_base = OTHER; mod_base = m5c; note = sugar modification: 2'-O-methoxyethylribose; note = backbone modification: 5'-phosphorothioate
  modified_base 4: mod_base = OTHER; note = thymine; note = sugar modification: 2'-O-methoxyethylribose; note = backbone modification: 5'-phosphorothioate
  modified_base 5: mod_base = OTHER; note = backbone modification: 5'-phosphorothioate; note = thymine; note = sugar modification: 2'-O-methoxyethylribose
  modified_base 6: mod_base = OTHER; note = sugar modification: 2'-O-methoxyethylribose; note = backbone modification: 5'-phosphorothioate
  modified_base 7: mod_base = OTHER; note = backbone modification: 5'-phosphorothioate; note = thymine; note = sugar modification: 2'-O-methoxyethylribose
  modified_base 8: mod_base = OTHER; note = sugar modification: 2'-O-methoxyethylribose; note = backbone modification: 5'-phosphorothioate
  modified_base 9: mod_base = m5c; mod_base = OTHER; note = sugar modification: 2'-O-methoxyethylribose; note = backbone modification: 5'-phosphorothioate
  modified_base 10: mod_base = OTHER; note = thymine; note = backbone modification: 5'-phosphorothioate; note = sugar modification: 2'-O-methoxyethylribose
  modified_base 11: mod_base = OTHER; note = thymine; note = sugar modification: 2'-O-methoxyethylribose; note = backbone modification: 5'-phosphorothioate
  modified_base 12: mod_base = OTHER; mod_base = m5c; note = backbone modification: 5'-phosphorothioate; note = sugar modification: 2'-O-methoxyethylribose
  modified_base 13: mod_base = OTHER; note = backbone modification: 5'-phosphorothioate; note = sugar modification: lna
  modified_base 14: mod_base = OTHER; note = sugar modification: lna; note = thymine
ttcttgtacttcat

SEQ ID NO: 460 - RNA, 14 nt, synthetic construct
  source 1..14: mol_type = other RNA; note = Antisense oligonucleotide
  modified_base 1: mod_base = OTHER; note = thymine; note = sugar modification: lna; note = backbone modification: 5'-phosphorothioate
  modified_base 2: mod_base = OTHER; note = sugar modification: lna; note = backbone modification: 5'-phosphorothioate
  modified_base 3: mod_base = OTHER; note = backbone modification: 5'-phosphorothioate; note = thymine; note = sugar modification: 2'-O-methoxyethylribose
  modified_base 4: mod_base = OTHER; note = sugar modification: 2'-O-methoxyethylribose; note = thymine; note = backbone modification: 5'-phosphorothioate
  modified_base 5: mod_base = OTHER; mod_base = m5c; note = backbone modification: 5'-phosphorothioate; note = sugar modification: 2'-O-methoxyethylribose
  modified_base 6: mod_base = OTHER; note = sugar modification: 2'-O-methoxyethylribose; note = backbone modification: 5'-phosphorothioate; note = thymine
  modified_base 7: mod_base = OTHER; note = thymine; note = sugar modification: 2'-O-methoxyethylribose; note = backbone modification: 5'-phosphorothioate
  modified_base 8: mod_base = OTHER; note = sugar modification: 2'-O-methoxyethylribose; note = backbone modification: 5'-phosphorothioate
  modified_base 9: mod_base = OTHER; note = backbone modification: 5'-phosphorothioate; note = thymine; note = sugar modification: 2'-O-methoxyethylribose
  modified_base 10: mod_base = OTHER; note = sugar modification: 2'-O-methoxyethylribose; note = backbone modification: 5'-phosphorothioate
  modified_base 11: mod_base = m5c; mod_base = OTHER; note = sugar modification: 2'-O-methoxyethylribose; note = backbone modification: 5'-phosphorothioate
  modified_base 12: mod_base = OTHER; note = sugar modification: 2'-O-methoxyethylribose; note = thymine; note = backbone modification: 5'-phosphorothioate
  modified_base 13: mod_base = OTHER; note = backbone modification: 5'-phosphorothioate; note = sugar modification: lna; note = thymine
  modified_base 14: mod_base = OTHER; mod_base = m5c; note = sugar modification: lna
tgttcttgtacttc

SEQ ID NO: 461 - RNA, 16 nt, synthetic construct
  source 1..16: mol_type = other RNA; note = Antisense oligonucleotide
  modified_base 1: mod_base = OTHER; note = backbone modification: 5'-phosphorothioate; note = sugar modification: lna
  modified_base 2: mod_base = OTHER; note = sugar modification: lna; note = backbone modification: 5'-phosphorothioate
  modified_base 3: mod_base = OTHER; note = backbone modification: 5'-phosphorothioate; note = sugar modification: 2'-O-methoxyethylribose; note = thymine
  modified_base 4: mod_base = OTHER; note = sugar modification: 2'-O-methoxyethylribose; note = backbone modification: 5'-phosphorothioate
  modified_base 5: mod_base = OTHER; note = sugar modification: 2'-O-methoxyethylribose; note = thymine; note = backbone modification: 5'-phosphorothioate
  modified_base 6: mod_base = OTHER; note = backbone modification: 5'-phosphorothioate; note = thymine; note = sugar modification: 2'-O-methoxyethylribose
  modified_base 7: mod_base = m5c; mod_base = OTHER; note = sugar modification: 2'-O-methoxyethylribose; note = backbone modification: 5'-phosphorothioate
  modified_base 8: mod_base = OTHER; note = thymine; note = sugar modification: 2'-O-methoxyethylribose; note = backbone modification: 5'-phosphorothioate
  modified_base 9: mod_base = OTHER; note = backbone modification: 5'-phosphorothioate; note = sugar modification: 2'-O-methoxyethylribose; note = thymine
  modified_base 10: mod_base = OTHER; note = sugar modification: 2'-O-methoxyethylribose; note = backbone modification: 5'-phosphorothioate
  modified_base 11: mod_base = OTHER; note = sugar modification: 2'-O-methoxyethylribose; note = backbone modification: 5'-phosphorothioate; note = thymine
  modified_base 12: mod_base = OTHER; note = sugar modification: 2'-O-methoxyethylribose; note = backbone modification: 5'-phosphorothioate
  modified_base 13: mod_base = OTHER; mod_base = m5c; note = sugar modification: 2'-O-methoxyethylribose; note = backbone modification: 5'-phosphorothioate
  modified_base 14: mod_base = OTHER; note = thymine; note = sugar modification: 2'-O-methoxyethylribose; note = backbone modification: 5'-phosphorothioate
  modified_base 15: mod_base = OTHER; note = thymine; note = backbone modification: 5'-phosphorothioate; note = sugar modification: lna
  modified_base 16: mod_base = m5c; mod_base = OTHER; note = sugar modification: lna
ggtgttcttgtacttc

SEQ ID NO: 462 - RNA, 16 nt, synthetic construct
  source 1..16: mol_type = other RNA; note = Antisense oligonucleotide
  modified_base 1: mod_base = OTHER; note = sugar modification: lna; note = thymine; note = backbone modification: 5'-phosphorothioate
  modified_base 2: mod_base = OTHER; note = backbone modification: 5'-phosphorothioate; note = sugar modification: lna
  modified_base 3: mod_base = OTHER; note = sugar modification: 2'-O-methoxyethylribose; note = backbone modification: 5'-phosphorothioate; note = thymine
  modified_base 4: mod_base = OTHER; note = backbone modification: 5'-phosphorothioate; note = thymine; note = sugar modification: 2'-O-methoxyethylribose
  modified_base 5: mod_base = m5c; mod_base = OTHER; note = backbone modification: 5'-phosphorothioate; note = sugar modification: 2'-O-methoxyethylribose
  modified_base 6: mod_base = OTHER; note = backbone modification: 5'-phosphorothioate; note = sugar modification: 2'-O-methoxyethylribose; note = thymine
  modified_base 7: mod_base = OTHER; note = backbone modification: 5'-phosphorothioate; note = sugar modification: 2'-O-methoxyethylribose; note = thymine
  modified_base 8: mod_base = OTHER; note = backbone modification: 5'-phosphorothioate; note = sugar modification: 2'-O-methoxyethylribose
  modified_base 9: mod_base = OTHER; note = thymine; note = backbone modification: 5'-phosphorothioate; note = sugar modification: 2'-O-methoxyethylribose
  modified_base 10: mod_base = OTHER; note = backbone modification: 5'-phosphorothioate; note = sugar modification: 2'-O-methoxyethylribose
  modified_base 11: mod_base = m5c; mod_base = OTHER; note = sugar modification: 2'-O-methoxyethylribose; note = backbone modification: 5'-phosphorothioate
  modified_base 12: mod_base = OTHER; note = sugar modification: 2'-O-methoxyethylribose; note = thymine; note = backbone modification: 5'-phosphorothioate
  modified_base 13: mod_base = OTHER; note = thymine; note = backbone modification: 5'-phosphorothioate; note = sugar modification: 2'-O-methoxyethylribose
  modified_base 14: mod_base = OTHER; mod_base = m5c; note = backbone modification: 5'-phosphorothioate; note = sugar modification: 2'-O-methoxyethylribose
  modified_base 15: mod_base = OTHER; note = backbone modification: 5'-phosphorothioate; note = sugar modification: lna
  modified_base 16: mod_base = OTHER; note = sugar modification: lna; note = thymine
tgttcttgtacttcat

SEQ ID NO: 463 - RNA, 16 nt, synthetic construct
  source 1..16: mol_type = other RNA; note = Antisense oligonucleotide
  modified_base 1: mod_base = OTHER; note = backbone modification: 5'-phosphorothioate; note = sugar modification: lna
  modified_base 2: mod_base = OTHER; note = thymine; note = backbone modification: 5'-phosphorothioate; note = sugar modification: lna
  modified_base 3: mod_base = OTHER; note = sugar modification: 2'-O-methoxyethylribose; note = backbone modification: 5'-phosphorothioate
  modified_base 4: mod_base = OTHER; note = sugar modification: 2'-O-methoxyethylribose; note = backbone modification: 5'-phosphorothioate; note = thymine
  modified_base 5: mod_base = OTHER; note = thymine; note = backbone modification: 5'-phosphorothioate; note = sugar modification: 2'-O-methoxyethylribose
  modified_base 6: mod_base = OTHER; mod_base = m5c; note = sugar modification: 2'-O-methoxyethylribose; note = backbone modification: 5'-phosphorothioate
  modified_base 7: mod_base = OTHER; note = sugar modification: 2'-O-methoxyethylribose; note = thymine; note = backbone modification: 5'-phosphorothioate
  modified_base 8: mod_base = OTHER; note = thymine; note = sugar modification: 2'-O-methoxyethylribose; note = backbone modification: 5'-phosphorothioate
  modified_base 9: mod_base = OTHER; note = backbone modification: 5'-phosphorothioate; note = sugar modification: 2'-O-methoxyethylribose
  modified_base 10: mod_base = OTHER; note = thymine; note = backbone modification: 5'-phosphorothioate; note = sugar modification: 2'-O-methoxyethylribose
  modified_base 11: mod_base = OTHER; note = sugar modification: 2'-O-methoxyethylribose; note = backbone modification: 5'-phosphorothioate
  modified_base 12: mod_base = m5c; mod_base = OTHER; note = sugar modification: 2'-O-methoxyethylribose; note = backbone modification: 5'-phosphorothioate
  modified_base 13: mod_base = OTHER; note = backbone modification: 5'-phosphorothioate; note = thymine; note = sugar modification: 2'-O-methoxyethylribose
  modified_base 14: mod_base = OTHER; note = thymine; note = sugar modification: 2'-O-methoxyethylribose; note = backbone modification: 5'-phosphorothioate
  modified_base 15: mod_base = OTHER; mod_base = m5c; note = backbone modification: 5'-phosphorothioate; note = sugar modification: lna
  modified_base 16: mod_base = OTHER; note = sugar modification: lna
gtgttcttgtacttca

SEQ ID NO: 464 - RNA, 20 nt, synthetic construct
  source 1..20: mol_type = other RNA; note = Antisense oligonucleotide
  modified_base 1: mod_base = OTHER; note = backbone modification: 5'-phosphorothioate; note = sugar modification: lna
  modified_base 2: mod_base = OTHER; note = sugar modification: lna; note = backbone modification: 5'-phosphorothioate
  modified_base 3: mod_base = OTHER; note = backbone modification: 5'-phosphorothioate; note = thymine; note = sugar modification: 2'-O-methoxyethylribose
  modified_base 4: mod_base = OTHER; note = backbone modification: 5'-phosphorothioate; note = sugar modification: 2'-O-methoxyethylribose
  modified_base 5: mod_base = OTHER; note = backbone modification: 5'-phosphorothioate; note = thymine; note = sugar modification: 2'-O-methoxyethylribose
  modified_base 6: mod_base = OTHER; note = backbone modification: 5'-phosphorothioate; note = thymine; note = sugar modification: 2'-O-methoxyethylribose
  modified_base 7: mod_base = OTHER; mod_base = m5c; note = sugar modification: 2'-O-methoxyethylribose; note = backbone modification: 5'-phosphorothioate
  modified_base 8: mod_base = OTHER; note = backbone modification: 5'-phosphorothioate; note = thymine; note = sugar modification: 2'-O-methoxyethylribose
  modified_base 9: mod_base = OTHER; note = sugar modification: 2'-O-methoxyethylribose; note = thymine; note = backbone modification: 5'-phosphorothioate
  modified_base 10: mod_base = OTHER; note = backbone modification: 5'-phosphorothioate; note = sugar modification: 2'-O-methoxyethylribose
  modified_base 11: mod_base = OTHER; note = thymine; note = sugar modification: 2'-O-methoxyethylribose; note = backbone modification: 5'-phosphorothioate
  modified_base 12: mod_base = OTHER; note = sugar modification: 2'-O-methoxyethylribose; note = backbone modification: 5'-phosphorothioate
  modified_base 13: mod_base = m5c; mod_base = OTHER; note = sugar modification: 2'-O-methoxyethylribose; note = backbone modification: 5'-phosphorothioate
  modified_base 14: mod_base = OTHER; note = backbone modification: 5'-phosphorothioate; note = sugar modification: 2'-O-methoxyethylribose; note = thymine
  modified_base 15: mod_base = OTHER; note = backbone modification: 5'-phosphorothioate; note = thymine; note = sugar modification: 2'-O-methoxyethylribose
  modified_base 16: mod_base = m5c; mod_base = OTHER; note = sugar modification: 2'-O-methoxyethylribose; note = backbone modification: 5'-phosphorothioate
  modified_base 17: mod_base = OTHER; note = sugar modification: 2'-O-methoxyethylribose; note = backbone modification: 5'-phosphorothioate
  modified_base 18: mod_base = OTHER; note = thymine; note = sugar modification: 2'-O-methoxyethylribose; note = backbone modification: 5'-phosphorothioate
  modified_base 19: mod_base = m5c; mod_base = OTHER; note = sugar modification: lna; note = backbone modification: 5'-phosphorothioate
  modified_base 20: mod_base = m5c; mod_base = OTHER; note = sugar modification: lna
ggtgttcttgtacttcatcc

SEQ ID NO: 465 - RNA, 20 nt, synthetic construct
  source 1..20: mol_type = other RNA; note = Antisense oligonucleotide
  modified_base 1: mod_base = OTHER; note = backbone modification: 5'-phosphorothioate; note = sugar modification: lna
  modified_base 2: mod_base = OTHER; note = sugar modification: lna; note = backbone modification: 5'-phosphorothioate
  modified_base 3: mod_base = OTHER; note = sugar modification: 2'-O-methoxyethylribose; note = backbone modification: 5'-phosphorothioate
  modified_base 4: mod_base = OTHER; note = sugar modification: 2'-O-methoxyethylribose; note = backbone modification: 5'-phosphorothioate
  modified_base 5: mod_base = OTHER; note = backbone modification: 5'-phosphorothioate; note = thymine; note = sugar modification: 2'-O-methoxyethylribose
  modified_base 6: mod_base = OTHER; note = backbone modification: 5'-phosphorothioate; note = sugar modification: 2'-O-methoxyethylribose
  modified_base 7: mod_base = OTHER; note = thymine; note = sugar modification: 2'-O-methoxyethylribose; note = backbone modification: 5'-phosphorothioate
  modified_base 8: mod_base = OTHER; note = thymine; note = backbone modification: 5'-phosphorothioate; note = sugar modification: 2'-O-methoxyethylribose
  modified_base 9: mod_base = m5c; mod_base = OTHER; note = backbone modification: 5'-phosphorothioate; note = sugar modification: 2'-O-methoxyethylribose
  modified_base 10: mod_base = OTHER; note = thymine; note = backbone modification: 5'-phosphorothioate; note = sugar modification: 2'-O-methoxyethylribose
  modified_base 11: mod_base = OTHER; note = sugar modification: 2'-O-methoxyethylribose; note = thymine; note = backbone modification: 5'-phosphorothioate
  modified_base 12: mod_base = OTHER; note = sugar modification: 2'-O-methoxyethylribose; note = backbone modification: 5'-phosphorothioate
  modified_base 13: mod_base = OTHER; note = thymine; note = sugar modification: 2'-O-methoxyethylribose; note = backbone modification: 5'-phosphorothioate
  modified_base 14: mod_base = OTHER; note = backbone modification: 5'-phosphorothioate; note = sugar modification: 2'-O-methoxyethylribose
  modified_base 15: mod_base = m5c; mod_base = OTHER; note = backbone modification: 5'-phosphorothioate; note = sugar modification: 2'-O-methoxyethylribose
  modified_base 16: mod_base = OTHER; note = backbone modification: 5'-phosphorothioate; note = thymine; note = sugar modification: 2'-O-methoxyethylribose
  modified_base 17: mod_base = OTHER; note = thymine; note = sugar modification: 2'-O-methoxyethylribose; note = backbone modification: 5'-phosphorothioate
  modified_base 18: mod_base = OTHER; mod_base = m5c; note = sugar modification: 2'-O-methoxyethylribose; note = backbone modification: 5'-phosphorothioate
  modified_base 19: mod_base = OTHER; note = sugar modification: lna; note = backbone modification: 5'-phosphorothioate
  modified_base 20: mod_base = OTHER; note = sugar modification: lna; note = thymine
aaggtgttcttgtacttcat

SEQ ID NO: 466 - RNA, 20 nt, synthetic construct
  source 1..20: mol_type = other RNA; note = Antisense oligonucleotide
  modified_base 1: mod_base = OTHER; note = backbone modification: 5'-phosphorothioate; note = sugar modification: lna
  modified_base 2: mod_base = OTHER; note = backbone modification: 5'-phosphorothioate; note = sugar modification: lna
  modified_base 3: mod_base = OTHER; note = backbone modification: 5'-phosphorothioate; note = sugar modification: 2'-O-methoxyethylribose
  modified_base 4: mod_base = OTHER; note = backbone modification: 5'-phosphorothioate; note = thymine; note = sugar modification: 2'-O-methoxyethylribose
  modified_base 5: mod_base = OTHER; note = sugar modification: 2'-O-methoxyethylribose; note = backbone modification: 5'-phosphorothioate
  modified_base 6: mod_base = OTHER; note = backbone modification: 5'-phosphorothioate; note = sugar modification: 2'-O-methoxyethylribose; note = thymine
  modified_base 7: mod_base = OTHER; note = thymine; note = backbone modification: 5'-phosphorothioate; note = sugar modification: 2'-O-methoxyethylribose
  modified_base 8: mod_base = OTHER; mod_base = m5c; note = backbone modification: 5'-phosphorothioate; note = sugar modification: 2'-O-methoxyethylribose
  modified_base 9: mod_base = OTHER; note = backbone modification: 5'-phosphorothioate; note = sugar modification: 2'-O-methoxyethylribose; note = thymine
  modified_base 10: mod_base = OTHER; note = backbone modification: 5'-phosphorothioate; note = thymine; note = sugar modification: 2'-O-methoxyethylribose
  modified_base 11: mod_base = OTHER; note = backbone modification: 5'-phosphorothioate; note = sugar modification: 2'-O-methoxyethylribose
  modified_base 12: mod_base = OTHER; note = sugar modification: 2'-O-methoxyethylribose; note = backbone modification: 5'-phosphorothioate; note = thymine
  modified_base 13: mod_base = OTHER; note = sugar modification: 2'-O-methoxyethylribose; note = backbone modification: 5'-phosphorothioate
  modified_base 14: mod_base = OTHER; mod_base = m5c; note = backbone modification: 5'-phosphorothioate; note = sugar modification: 2'-O-methoxyethylribose
  modified_base 15: mod_base = OTHER; note = backbone modification: 5'-phosphorothioate; note = thymine; note = sugar modification: 2'-O-methoxyethylribose
  modified_base 16: mod_base = OTHER; note = thymine; note = backbone modification: 5'-phosphorothioate; note = sugar modification: 2'-O-methoxyethylribose
  modified_base 17: mod_base = m5c; mod_base = OTHER; note = sugar modification: 2'-O-methoxyethylribose; note = backbone modification: 5'-phosphorothioate
  modified_base 18: mod_base = OTHER; note = backbone modification: 5'-phosphorothioate; note = sugar modification: 2'-O-methoxyethylribose
  modified_base 19: mod_base = OTHER; note = sugar modification: lna; note = backbone modification: 5'-phosphorothioate; note = thymine
  modified_base 20: mod_base = OTHER; mod_base = m5c; note = sugar modification: lna
aggtgttcttgtacttcatc

SEQ ID NO: 467 - RNA, 18 nt, synthetic construct
  source 1..18: mol_type = other RNA; note = Antisense oligonucleotide
  modified_base 1: mod_base = OTHER; note = backbone modification: 5'-phosphorothioate; note = thymine; note = sugar modification: 2'-O-methoxyethylribose
  modified_base 2: mod_base = OTHER; note = backbone modification: 5'-phosphorothioate; note = sugar modification: 2'-O-methoxyethylribose; note = thymine
  modified_base 3: mod_base = OTHER; mod_base = m5c; note = sugar modification: 2'-O-methoxyethylribose; note = backbone modification: 5'-phosphorothioate
  modified_base 4: mod_base = OTHER; note = sugar modification: 2'-O-methoxyethylribose; note = backbone modification: 5'-phosphorothioate; note = thymine
  modified_base 5: mod_base = OTHER; note = backbone modification: 5'-phosphorothioate; note = sugar modification: 2'-O-methoxyethylribose
  modified_base 6: mod_base = OTHER; note = backbone modification: 5'-phosphorothioate; note = sugar modification: 2'-O-methoxyethylribose
  modified_base 7: mod_base = OTHER; note = sugar modification: 2'-O-methoxyethylribose; note = backbone modification: 5'-phosphorothioate
  modified_base 8: mod_base = OTHER; note = sugar modification: 2'-O-methoxyethylribose; note = backbone modification: 5'-phosphorothioate
  modified_base 9: mod_base = OTHER; note = backbone modification: 5'-phosphorothioate; note = sugar modification: 2'-O-methoxyethylribose
  modified_base 10: mod_base = OTHER; note = sugar modification: 2'-O-methoxyethylribose; note = backbone modification: 5'-phosphorothioate; note = thymine
  modified_base 11: mod_base = OTHER; note = sugar modification: 2'-O-methoxyethylribose; note = backbone modification: 5'-phosphorothioate
  modified_base 12: mod_base = OTHER; note = thymine; note = sugar modification: 2'-O-methoxyethylribose; note = backbone modification: 5'-phosphorothioate
  modified_base 13: mod_base = OTHER; note = backbone modification: 5'-phosphorothioate; note = sugar modification: 2'-O-methoxyethylribose; note = thymine
  modified_base 14: mod_base = m5c; mod_base = OTHER; note = backbone modification: 5'-phosphorothioate; note = sugar modification: 2'-O-methoxyethylribose
  modified_base 15: mod_base = OTHER; note = sugar modification: 2'-O-methoxyethylribose; note = thymine; note = backbone modification: 5'-phosphorothioate
  modified_base 16: mod_base = OTHER; note = thymine; note = backbone modification: 5'-phosphorothioate; note = sugar modification: 2'-O-methoxyethylribose
  modified_base 17: mod_base = OTHER; note = backbone modification: 5'-phosphorothioate; note = sugar modification: 2'-O-methoxyethylribose
  modified_base 18: mod_base = OTHER; note = sugar modification: 2'-O-methoxyethylribose; note = thymine
ttctgaaggtgttcttgt

SEQ ID NO: 468 - RNA, 18 nt, synthetic construct
  source 1..18: mol_type = other RNA; note = Antisense oligonucleotide
  modified_base 1: mod_base = OTHER; note = backbone modification: 5'-phosphorothioate; note = sugar modification: 2'-O-methoxyethylribose
  modified_base 2: mod_base = OTHER; note = backbone modification: 5'-phosphorothioate; note = sugar modification: 2'-O-methoxyethylribose; note = thymine
  modified_base 3: mod_base = OTHER; note = sugar modification: 2'-O-methoxyethylribose; note = thymine; note = backbone modification: 5'-phosphorothioate
  modified_base 4: mod_base = m5c; mod_base = OTHER; note = sugar modification: 2'-O-methoxyethylribose; note = backbone modification: 5'-phosphorothioate
  modified_base 5: mod_base = OTHER; note = sugar modification: 2'-O-methoxyethylribose; note = backbone modification: 5'-phosphorothioate; note = thymine
  modified_base 6: mod_base = OTHER; note = backbone modification: 5'-phosphorothioate; note = sugar modification: 2'-O-methoxyethylribose
  modified_base 7: mod_base = OTHER; note = sugar modification: 2'-O-methoxyethylribose; note = backbone modification: 5'-phosphorothioate
  modified_base 8: mod_base = OTHER; note = backbone modification: 5'-phosphorothioate; note = sugar modification: 2'-O-methoxyethylribose
  modified_base 9: mod_base = OTHER; note = backbone modification: 5'-phosphorothioate; note = sugar modification: 2'-O-methoxyethylribose
  modified_base 10: mod_base = OTHER; note = sugar modification: 2'-O-methoxyethylribose; note = backbone modification: 5'-phosphorothioate
  modified_base 11: mod_base = OTHER; note = thymine; note = backbone modification: 5'-phosphorothioate; note = sugar modification: 2'-O-methoxyethylribose
  modified_base 12: mod_base = OTHER; note = sugar modification: 2'-O-methoxyethylribose; note = backbone modification: 5'-phosphorothioate
  modified_base 13: mod_base = OTHER; note = sugar modification: 2'-O-methoxyethylribose; note = thymine; note = backbone modification: 5'-phosphorothioate
  modified_base 14: mod_base = OTHER; note = thymine; note = sugar modification: 2'-O-methoxyethylribose; note = backbone modification: 5'-phosphorothioate
  modified_base 15: mod_base = OTHER; mod_base = m5c; note = backbone modification: 5'-phosphorothioate; note = sugar modification: 2'-O-methoxyethylribose
  modified_base 16: mod_base = OTHER; note = thymine; note = sugar modification: 2'-O-methoxyethylribose; note = backbone modification: 5'-phosphorothioate
  modified_base 17: mod_base = OTHER; note = sugar modification: 2'-O-methoxyethylribose; note = thymine; note = backbone modification: 5'-phosphorothioate
  modified_base 18: mod_base = OTHER; note = sugar modification: 2'-O-methoxyethylribose
gttctgaaggtgttcttg

SEQ ID NO: 469 - RNA, 18 nt, synthetic construct
  source 1..18: mol_type = other RNA; note = Antisense oligonucleotide
  modified_base 1: mod_base = OTHER; note = backbone modification: 5'-phosphorothioate; note = sugar modification: 2'-O-methoxyethylribose
  modified_base 2: mod_base = OTHER; note = sugar modification: 2'-O-methoxyethylribose; note = backbone modification: 5'-phosphorothioate
  modified_base 3: mod_base = OTHER; note = backbone modification: 5'-phosphorothioate; note = thymine; note = sugar modification: 2'-O-methoxyethylribose
  modified_base 4: mod_base = OTHER; note = sugar modification: 2'-O-methoxyethylribose; note = backbone modification: 5'-phosphorothioate; note = thymine
  modified_base 5: mod_base = OTHER; mod_base = m5c; note = sugar modification: 2'-O-methoxyethylribose; note = backbone modification: 5'-phosphorothioate
  modified_base 6: mod_base = OTHER; note = sugar modification: 2'-O-methoxyethylribose; note = backbone modification: 5'-phosphorothioate; note = thymine
  modified_base 7: mod_base = OTHER; note = sugar modification: 2'-O-methoxyethylribose; note = backbone modification: 5'-phosphorothioate
  modified_base 8: mod_base = OTHER; note = sugar modification: 2'-O-methoxyethylribose; note = backbone modification: 5'-phosphorothioate
  modified_base 9: mod_base = OTHER; note = sugar modification: 2'-O-methoxyethylribose; note = backbone modification: 5'-phosphorothioate
  modified_base 10: mod_base = OTHER; note = sugar modification: 2'-O-methoxyethylribose; note = backbone modification: 5'-phosphorothioate
  modified_base 11: mod_base = OTHER; note = sugar modification: 2'-O-methoxyethylribose; note = backbone modification: 5'-phosphorothioate
  modified_base 12: mod_base = OTHER; note = sugar modification: 2'-O-methoxyethylribose; note = thymine; note = backbone modification: 5'-phosphorothioate
  modified_base 13: mod_base = OTHER; note = backbone modification: 5'-phosphorothioate; note = sugar modification: 2'-O-methoxyethylribose
  modified_base 14: mod_base = OTHER; note = backbone modification: 5'-phosphorothioate; note = thymine; note = sugar modification: 2'-O-methoxyethylribose
  modified_base 15: mod_base = OTHER; note = thymine; note = sugar modification: 2'-O-methoxyethylribose; note = backbone modification: 5'-phosphorothioate
  modified_base 16: mod_base = m5c; mod_base = OTHER; note = sugar modification: 2'-O-methoxyethylribose; note = backbone modification: 5'-phosphorothioate
  modified_base 17: mod_base = OTHER; note = sugar modification: 2'-O-methoxyethylribose; note = backbone modification: 5'-phosphorothioate; note = thymine
  modified_base 18: mod_base = OTHER; note = thymine; note = sugar modification: 2'-O-methoxyethylribose
ggttctgaaggtgttctt

SEQ ID NO: 470 - RNA, 18 nt, synthetic construct
  source 1..18: mol_type = other RNA; note = Antisense oligonucleotide
  modified_base 1: mod_base = m5c; mod_base = OTHER; note = sugar modification: 2'-O-methoxyethylribose; note = backbone modification: 5'-phosphorothioate
  modified_base 2: mod_base = OTHER; mod_base = m5c; note = backbone modification: 5'-phosphorothioate; note = sugar modification: 2'-O-methoxyethylribose
  modified_base 3: mod_base = OTHER; note = backbone modification: 5'-phosphorothioate; note = sugar modification: 2'-O-methoxyethylribose
  modified_base 4: mod_base = OTHER; note = sugar modification: 2'-O-methoxyethylribose; note = backbone modification: 5'-phosphorothioate
  modified_base 5: mod_base = OTHER; note = thymine; note = backbone modification: 5'-phosphorothioate; note = sugar modification: 2'-O-methoxyethylribose
  modified_base 6: mod_base = OTHER; note = thymine; note = backbone modification: 5'-phosphorothioate; note = sugar modification: 2'-O-methoxyethylribose
  modified_base 7: mod_base = m5c; mod_base = OTHER; note = backbone modification: 5'-phosphorothioate; note = sugar modification: 2'-O-methoxyethylribose
  modified_base 8: mod_base = OTHER; note = sugar modification: 2'-O-methoxyethylribose; note = backbone modification: 5'-phosphorothioate; note = thymine
  modified_base 9: mod_base = OTHER; note = backbone modification: 5'-phosphorothioate; note = sugar modification: 2'-O-methoxyethylribose
  modified_base 10: mod_base = OTHER; note = backbone modification: 5'-phosphorothioate; note = sugar modification: 2'-O-methoxyethylribose
  modified_base 11: mod_base = OTHER; note = sugar modification: 2'-O-methoxyethylribose; note = backbone modification: 5'-phosphorothioate
  modified_base 12: mod_base = OTHER; note = sugar modification: 2'-O-methoxyethylribose; note = backbone modification: 5'-phosphorothioate
  modified_base 13: mod_base = OTHER; note = sugar modification: 2'-O-methoxyethylribose; note = backbone modification: 5'-phosphorothioate
  modified_base 14: mod_base = OTHER; note = backbone modification: 5'-phosphorothioate; note = thymine; note = sugar modification: 2'-O-methoxyethylribose
  modified_base 15: mod_base = OTHER; note = backbone modification: 5'-phosphorothioate; note = sugar modification: 2'-O-methoxyethylribose
  modified_base 16: mod_base = OTHER; note = thymine; note = sugar modification: 2'-O-methoxyethylribose; note = backbone modification: 5'-phosphorothioate
  modified_base 17: mod_base = OTHER; note = sugar modification: 2'-O-methoxyethylribose; note = thymine; note = backbone modification: 5'-phosphorothioate
  modified_base 18: mod_base = OTHER; mod_base = m5c; note = sugar modification: 2'-O-methoxyethylribose
ccggttctgaaggtgttc

SEQ ID NO: 471 - RNA, 18 nt, synthetic construct
  source 1..18: mol_type = other RNA; note = Antisense oligonucleotide
  modified_base 1: mod_base = OTHER; note = thymine; note = backbone modification: 5'-phosphorothioate; note = sugar modification: 2'-O-methoxyethylribose
  modified_base 2: mod_base = m5c; mod_base = OTHER; note = sugar modification: 2'-O-methoxyethylribose; note = backbone modification: 5'-phosphorothioate
  modified_base 3: mod_base = m5c; mod_base = OTHER; note = sugar modification: 2'-O-methoxyethylribose; note = backbone modification: 5'-phosphorothioate
  modified_base 4: mod_base = OTHER; note = backbone modification: 5'-phosphorothioate; note = sugar modification: 2'-O-methoxyethylribose
  modified_base 5: mod_base = OTHER; note = sugar modification: 2'-O-methoxyethylribose; note = backbone modification: 5'-phosphorothioate
  modified_base 6: mod_base = OTHER; note = sugar modification: 2'-O-methoxyethylribose; note = backbone modification: 5'-phosphorothioate; note = thymine
  modified_base 7: mod_base = OTHER; note = thymine; note = backbone modification: 5'-phosphorothioate; note = sugar modification: 2'-O-methoxyethylribose
  modified_base 8: mod_base = m5c; mod_base = OTHER; note = sugar modification: 2'-O-methoxyethylribose; note = backbone modification: 5'-phosphorothioate
  modified_base 9: mod_base = OTHER; note = sugar modification: 2'-O-methoxyethylribose; note = thymine; note = backbone modification: 5'-phosphorothioate
  modified_base 10: mod_base = OTHER; note = backbone modification: 5'-phosphorothioate; note = sugar modification: 2'-O-methoxyethylribose
  modified_base 11: mod_base = OTHER; note = sugar modification: 2'-O-methoxyethylribose; note = backbone modification: 5'-phosphorothioate
  modified_base 12: mod_base = OTHER; note = sugar modification: 2'-O-methoxyethylribose; note = backbone modification: 5'-phosphorothioate
  modified_base 13: mod_base = OTHER; note = backbone modification: 5'-phosphorothioate; note = sugar modification: 2'-O-methoxyethylribose
  modified_base 14: mod_base = OTHER; note = backbone modification: 5'-phosphorothioate; note = sugar modification: 2'-O-methoxyethylribose
  modified_base 15: mod_base = OTHER; note = backbone modification: 5'-phosphorothioate; note = sugar modification: 2'-O-methoxyethylribose; note = thymine
  modified_base 16: mod_base = OTHER; note = backbone modification: 5'-phosphorothioate; note = sugar modification: 2'-O-methoxyethylribose
  modified_base 17: mod_base = OTHER; note = backbone modification: 5'-phosphorothioate; note = thymine; note = sugar modification: 2'-O-methoxyethylribose
  modified_base 18: mod_base = OTHER; note = sugar modification: 2'-O-methoxyethylribose; note = thymine
tccggttctgaaggtgtt

SEQ ID NO: 472 - RNA, 18 nt, synthetic construct
  source 1..18: mol_type = other RNA; note = Antisense oligonucleotide
  modified_base 1: mod_base = OTHER; mod_base = m5c; note = backbone modification: 5'-phosphorothioate; note = sugar modification: 2'-O-methoxyethylribose
  modified_base 2: mod_base = OTHER; note = sugar modification: 2'-O-methoxyethylribose; note = backbone modification: 5'-phosphorothioate; note = thymine
  modified_base 3: mod_base = OTHER; mod_base = m5c; note = sugar modification: 2'-O-methoxyethylribose; note = backbone modification: 5'-phosphorothioate
  modified_base 4: mod_base = OTHER; mod_base = m5c; note = backbone modification: 5'-phosphorothioate; note = sugar modification: 2'-O-methoxyethylribose
  modified_base 5: mod_base = OTHER; note = sugar modification: 2'-O-methoxyethylribose; note = backbone modification: 5'-phosphorothioate
  modified_base 6: mod_base = OTHER; note = sugar modification: 2'-O-methoxyethylribose; note = backbone modification: 5'-phosphorothioate
  modified_base 7: mod_base = OTHER; note = sugar modification: 2'-O-methoxyethylribose; note = thymine; note = backbone modification: 5'-phosphorothioate
  modified_base 8: mod_base = OTHER; note = backbone modification: 5'-phosphorothioate; note = thymine; note = sugar modification: 2'-O-methoxyethylribose
  modified_base 9: mod_base = m5c; mod_base = OTHER; note = sugar modification: 2'-O-methoxyethylribose; note = backbone modification: 5'-phosphorothioate
  modified_base 10: mod_base = OTHER; note = sugar modification: 2'-O-methoxyethylribose; note = thymine; note = backbone modification: 5'-phosphorothioate
  modified_base 11: mod_base = OTHER; note = sugar modification: 2'-O-methoxyethylribose; note = backbone modification: 5'-phosphorothioate
  modified_base 12: mod_base = OTHER; note = backbone modification: 5'-phosphorothioate; note = sugar modification: 2'-O-methoxyethylribose
  modified_base 13: mod_base = OTHER; note = backbone modification: 5'-phosphorothioate; note = sugar modification: 2'-O-methoxyethylribose
  modified_base 14: mod_base = OTHER; note = backbone modification: 5'-phosphorothioate; note = sugar modification: 2'-O-methoxyethylribose
  modified_base 15: mod_base = OTHER; note = sugar modification: 2'-O-methoxyethylribose; note = backbone modification: 5'-phosphorothioate
  modified_base 16: mod_base = OTHER; note = thymine; note = sugar modification: 2'-O-methoxyethylribose; note = backbone modification: 5'-phosphorothioate
  modified_base 17: mod_base = OTHER; note = sugar modification: 2'-O-methoxyethylribose; note = backbone modification: 5'-phosphorothioate
  modified_base 18: mod_base = OTHER; note = sugar modification: 2'-O-methoxyethylribose; note = thymine
ctccggttctgaaggtgt

SEQ ID NO: 473 - RNA, 18 nt, synthetic construct
  source 1..18: mol_type = other RNA; note = Antisense oligonucleotide
  modified_base 1: mod_base = OTHER; mod_base = m5c; note = sugar modification: 2'-O-methoxyethylribose; note = backbone modification: 5'-phosphorothioate
  modified_base 2: mod_base = OTHER; mod_base = m5c; note = sugar modification: 2'-O-methoxyethylribose; note = backbone modification: 5'-phosphorothioate
  modified_base 3: mod_base = OTHER; note = sugar modification: 2'-O-methoxyethylribose; note = backbone modification: 5'-phosphorothioate; note = thymine
  modified_base 4: mod_base = m5c; mod_base = OTHER; note = sugar modification: 2'-O-methoxyethylribose; note = backbone modification: 5'-phosphorothioate
  modified_base 5: mod_base = m5c; mod_base = OTHER; note = backbone modification: 5'-phosphorothioate; note = sugar modification: 2'-O-methoxyethylribose
  modified_base 6: mod_base = OTHER; note = backbone modification: 5'-phosphorothioate; note = sugar modification: 2'-O-methoxyethylribose
  modified_base 7: mod_base = OTHER; note = backbone modification: 5'-phosphorothioate; note = sugar modification: 2'-O-methoxyethylribose
  modified_base 8: mod_base = OTHER; note = backbone modification: 5'-phosphorothioate; note = thymine; note = sugar modification: 2'-O-methoxyethylribose
  modified_base 9: mod_base = OTHER; note = sugar modification: 2'-O-methoxyethylribose; note = thymine; note = backbone modification: 5'-phosphorothioate
  modified_base 10: mod_base = m5c; mod_base = OTHER; note = sugar modification: 2'-O-methoxyethylribose; note = backbone modification: 5'-phosphorothioate
  modified_base 11: mod_base = OTHER; note = backbone modification: 5'-phosphorothioate; note = thymine; note = sugar modification: 2'-O-methoxyethylribose
  modified_base 12: mod_base = OTHER; note = sugar modification: 2'-O-methoxyethylribose; note = backbone modification: 5'-phosphorothioate
  modified_base 13: mod_base = OTHER; note = sugar modification: 2'-O-methoxyethylribose; note = backbone modification: 5'-phosphorothioate
  modified_base 14: mod_base = OTHER; note = backbone modification: 5'-phosphorothioate; note = sugar modification: 2'-O-methoxyethylribose
  modified_base 15: mod_base = OTHER; note = sugar modification: 2'-O-methoxyethylribose; note = backbone modification: 5'-phosphorothioate
  modified_base 16: mod_base = OTHER; note = sugar modification: 2'-O-methoxyethylribose; note = backbone modification: 5'-phosphorothioate
  modified_base 17: mod_base = OTHER; note = sugar modification: 2'-O-methoxyethylribose; note = backbone modification: 5'-phosphorothioate; note = thymine
  modified_base 18: mod_base = OTHER; note = sugar modification: 2'-O-methoxyethylribose
cctccggttctgaaggtg

SEQ ID NO: 474 - RNA, 18 nt, synthetic construct
  source 1..18: mol_type = other RNA; note = Antisense oligonucleotide
  modified_base 1: mod_base = OTHER; note = backbone modification: 5'-phosphorothioate; note = sugar modification: 2'-O-methoxyethylribose
  modified_base 2: mod_base = OTHER; note = sugar modification: 2'-O-methoxyethylribose; note = backbone modification: 5'-phosphorothioate; note = thymine
  modified_base 3: mod_base = OTHER; note = sugar modification: 2'-O-methoxyethylribose; note = backbone modification: 5'-phosphorothioate; note = thymine
  modified_base 4: mod_base = m5c; mod_base = OTHER; note = backbone modification: 5'-phosphorothioate; note = sugar modification: 2'-O-methoxyethylribose
  modified_base 5: mod_base = OTHER; note = sugar modification: 2'-O-methoxyethylribose; note = backbone modification: 5'-phosphorothioate
  modified_base 6: mod_base = OTHER; note = sugar modification: 2'-O-methoxyethylribose; note = backbone modification: 5'-phosphorothioate
  modified_base 7: mod_base = OTHER; mod_base = m5c; note = backbone modification: 5'-phosphorothioate; note = sugar modification: 2'-O-methoxyethylribose
  modified_base 8: mod_base = OTHER; note = backbone modification: 5'-phosphorothioate; note = sugar modification: 2'-O-methoxyethylribose; note = thymine
  modified_base 9: mod_base = OTHER; note = sugar modification: 2'-O-methoxyethylribose; note = backbone modification: 5'-phosphorothioate
  modified_base 10: mod_base = OTHER; note = backbone modification: 5'-phosphorothioate; note = thymine; note = sugar modification: 2'-O-methoxyethylribose
  modified_base 11: mod_base = OTHER; note = thymine; note = sugar modification: 2'-O-methoxyethylribose; note = backbone modification: 5'-phosphorothioate
  modified_base 12: mod_base = OTHER; note = backbone modification: 5'-phosphorothioate; note = sugar modification: 2'-O-methoxyethylribose
  modified_base 13: mod_base = OTHER; mod_base = m5c; note = backbone modification: 5'-phosphorothioate; note = sugar modification: 2'-O-methoxyethylribose
  modified_base 14: mod_base = OTHER; mod_base = m5c; note = sugar modification: 2'-O-methoxyethylribose; note = backbone modification: 5'-phosphorothioate
  modified_base 15: mod_base = OTHER; note = sugar modification: 2'-O-methoxyethylribose; note = backbone modification: 5'-phosphorothioate; note = thymine
  modified_base 16: mod_base = OTHER; mod_base = m5c; note = backbone modification: 5'-phosphorothioate; note = sugar modification: 2'-O-methoxyethylribose
  modified_base 17: mod_base = OTHER; mod_base = m5c; note = sugar modification: 2'-O-methoxyethylribose; note = backbone modification: 5'-phosphorothioate
  modified_base 18: mod_base = OTHER; note = sugar modification: 2'-O-methoxyethylribose
attcaactgttgcctccg

SEQ ID NO: 475 - RNA, 18 nt, synthetic construct
  source 1..18: mol_type = other RNA; note = Antisense oligonucleotide
  modified_base 1: mod_base = m5c; mod_base = OTHER; note = sugar modification: 2'-O-methoxyethylribose; note = backbone modification: 5'-phosphorothioate
  modified_base 2: mod_base = OTHER; note = sugar modification: 2'-O-methoxyethylribose; note = backbone modification: 5'-phosphorothioate
  modified_base 3: mod_base = OTHER; note = sugar modification: 2'-O-methoxyethylribose; note = thymine; note = backbone modification: 5'-phosphorothioate
  modified_base 4: mod_base = OTHER; note = sugar modification: 2'-O-methoxyethylribose; note = thymine; note = backbone modification: 5'-phosphorothioate
  modified_base 5: mod_base = m5c; mod_base = OTHER; note = sugar modification: 2'-O-methoxyethylribose; note = backbone modification: 5'-phosphorothioate
  modified_base 6: mod_base = OTHER; note = backbone modification: 5'-phosphorothioate; note = sugar modification: 2'-O-methoxyethylribose
  modified_base 7: mod_base = OTHER; note = sugar modification: 2'-O-methoxyethylribose; note = backbone modification: 5'-phosphorothioate
  modified_base 8: mod_base = OTHER; mod_base = m5c; note = sugar modification: 2'-O-methoxyethylribose; note = backbone modification: 5'-phosphorothioate
  modified_base 9: mod_base = OTHER; note = backbone modification: 5'-phosphorothioate; note = sugar modification: 2'-O-methoxyethylribose; note = thymine
  modified_base 10: mod_base = OTHER; note = sugar modification: 2'-O-methoxyethylribose; note = backbone modification: 5'-phosphorothioate
  modified_base 11: mod_base = OTHER; note = sugar modification: 2'-O-methoxyethylribose; note = thymine; note = backbone modification: 5'-phosphorothioate
  modified_base 12: mod_base = OTHER; note = backbone modification: 5'-phosphorothioate; note = sugar modification: 2'-O-methoxyethylribose; note = thymine
  modified_base 13: mod_base = OTHER; note = sugar modification: 2'-O-methoxyethylribose; note = backbone modification: 5'-phosphorothioate
  modified_base 14: mod_base = OTHER; mod_base = m5c; note = sugar modification: 2'-O-methoxyethylribose; note = backbone modification: 5'-phosphorothioate
  modified_base 15: mod_base = m5c; mod_base = OTHER; note = sugar modification: 2'-O-methoxyethylribose; note = backbone modification: 5'-phosphorothioate
  modified_base 16: mod_base = OTHER; note = thymine; note = backbone modification: 5'-phosphorothioate; note = sugar modification: 2'-O-methoxyethylribose
  modified_base 17: mod_base = OTHER; mod_base = m5c; note = backbone modification: 5'-phosphorothioate; note = sugar modification: 2'-O-methoxyethylribose
  modified_base 18: mod_base = OTHER; mod_base = m5c; note = sugar modification: 2'-O-methoxyethylribose
cattcaactgttgcctcc

SEQ ID NO: 476 - RNA, 18 nt, synthetic construct
  source 1..18: mol_type = other RNA; note = Antisense oligonucleotide
  modified_base 1: mod_base = OTHER; note = backbone modification: 5'-phosphorothioate; note = sugar modification: 2'-O-methoxyethylribose; note = thymine
  modified_base 2: mod_base = OTHER; mod_base = m5c; note = backbone modification: 5'-phosphorothioate; note = sugar modification: 2'-O-methoxyethylribose
  modified_base 3: mod_base = OTHER; note = sugar modification: 2'-O-methoxyethylribose; note = backbone modification: 5'-phosphorothioate
  modified_base 4: mod_base = OTHER; note = sugar modification: 2'-O-methoxyethylribose; note = thymine; note = backbone modification: 5'-phosphorothioate
  modified_base 5: mod_base = OTHER; note = sugar modification: 2'-O-methoxyethylribose; note = backbone modification: 5'-phosphorothioate; note = thymine
  modified_base 6: mod_base = OTHER; mod_base = m5c; note = sugar modification: 2'-O-methoxyethylribose; note = backbone modification: 5'-phosphorothioate
  modified_base 7: mod_base = OTHER; note = sugar modification: 2'-O-methoxyethylribose; note = backbone modification: 5'-phosphorothioate
  modified_base 8: mod_base = OTHER; note = sugar modification: 2'-O-methoxyethylribose; note = backbone modification: 5'-phosphorothioate
  modified_base 9: mod_base = OTHER; mod_base = m5c; note = backbone modification: 5'-phosphorothioate; note = sugar modification: 2'-O-methoxyethylribose
  modified_base 10: mod_base = OTHER; note = thymine; note = sugar modification: 2'-O-methoxyethylribose; note = backbone modification: 5'-phosphorothioate
  modified_base 11: mod_base = OTHER; note = backbone modification: 5'-phosphorothioate; note = sugar modification: 2'-O-methoxyethylribose
  modified_base 12: mod_base = OTHER; note = sugar modification: 2'-O-methoxyethylribose; note = thymine; note = backbone modification: 5'-phosphorothioate
  modified_base 13: mod_base = OTHER; note = sugar modification: 2'-O-methoxyethylribose; note = backbone modification: 5'-phosphorothioate; note = thymine
  modified_base 14: mod_base = OTHER; note = sugar modification: 2'-O-methoxyethylribose; note = backbone modification: 5'-phosphorothioate
  modified_base 15: mod_base = OTHER; mod_base = m5c; note = sugar modification: 2'-O-methoxyethylribose; note = backbone modification: 5'-phosphorothioate
  modified_base 16: mod_base = OTHER; mod_base = m5c; note = sugar modification: 2'-O-methoxyethylribose; note = backbone modification: 5'-phosphorothioate
  modified_base 17: mod_base = OTHER; note = sugar modification: 2'-O-methoxyethylribose; note = backbone modification: 5'-phosphorothioate; note = thymine
  modified_base 18: mod_base = m5c; mod_base = OTHER; note = sugar modification: 2'-O-methoxyethylribose
tcattcaactgttgcctc

SEQ ID NO: 477 - RNA, 18 nt, synthetic construct
  source 1..18: mol_type = other RNA; note = Antisense oligonucleotide
  modified_base 1: mod_base = OTHER; note = thymine; note = backbone modification: 5'-phosphorothioate; note = sugar modification: 2'-O-methoxyethylribose
  modified_base 2: mod_base = OTHER; note = thymine; note = backbone modification: 5'-phosphorothioate; note = sugar modification: 2'-O-methoxyethylribose
  modified_base 3: mod_base = m5c; mod_base = OTHER; note = backbone modification: 5'-phosphorothioate; note = sugar modification: 2'-O-methoxyethylribose
  modified_base 4: mod_base = OTHER; note = backbone modification: 5'-phosphorothioate; note = sugar modification: 2'-O-methoxyethylribose
  modified_base 5: mod_base = OTHER; note = thymine; note = sugar modification: 2'-O-methoxyethylribose; note = backbone modification: 5'-phosphorothioate
  modified_base 6: mod_base = OTHER; note = thymine; note = backbone modification: 5'-phosphorothioate; note = sugar modification: 2'-O-methoxyethylribose
  modified_base 7: mod_base = m5c; mod_base = OTHER; note = sugar modification: 2'-O-methoxyethylribose; note = backbone modification: 5'-phosphorothioate
  modified_base 8: mod_base = OTHER; note = sugar modification: 2'-O-methoxyethylribose; note = backbone modification: 5'-phosphorothioate
  modified_base 9: mod_base = OTHER; note = sugar modification: 2'-O-methoxyethylribose; note = backbone modification: 5'-phosphorothioate
  modified_base 10: mod_base = OTHER; mod_base = m5c; note = backbone modification: 5'-phosphorothioate; note = sugar modification: 2'-O-methoxyethylribose
  modified_base 11: mod_base = OTHER; note = backbone modification: 5'-phosphorothioate; note = sugar modification: 2'-O-methoxyethylribose; note = thymine
  modified_base 12: mod_base = OTHER; note = sugar modification: 2'-O-methoxyethylribose; note = backbone modification: 5'-phosphorothioate
  modified_base 13: mod_base = OTHER; note = sugar modification: 2'-O-methoxyethylribose; note = backbone modification: 5'-phosphorothioate; note = thymine
  modified_base 14: mod_base = OTHER; note = thymine; note = sugar modification: 2'-O-methoxyethylribose; note = backbone modification: 5'-phosphorothioate
  modified_base 15: mod_base = OTHER; note = backbone modification: 5'-phosphorothioate; note = sugar modification: 2'-O-methoxyethylribose
  modified_base 16: mod_base = OTHER; mod_base = m5c; note = backbone modification: 5'-phosphorothioate; note = sugar modification: 2'-O-methoxyethylribose
  modified_base 17: mod_base = OTHER; mod_base = m5c; note = sugar modification: 2'-O-methoxyethylribose; note = backbone modification: 5'-phosphorothioate
  modified_base 18: mod_base = OTHER; note = sugar modification: 2'-O-methoxyethylribose; note = thymine
ttcattcaactgttgcct

SEQ ID NO: 478 - RNA, 18 nt, synthetic construct
  source 1..18: mol_type = other RNA; note = Antisense oligonucleotide
  modified_base 1: mod_base = OTHER; note = backbone modification: 5'-phosphorothioate; note = sugar modification: 2'-O-methoxyethylribose
  modified_base 2: mod_base = OTHER; note = sugar modification: 2'-O-methoxyethylribose; note = thymine; note = backbone modification: 5'-phosphorothioate
  modified_base 3: mod_base = OTHER; note = sugar modification: 2'-O-methoxyethylribose; note = thymine; note = backbone modification: 5'-phosphorothioate
  modified_base 4: mod_base = OTHER; note = backbone modification: 5'-phosphorothioate; note = sugar modification: 2'-O-methoxyethylribose; note = thymine
  modified_base 5: mod_base = m5c; mod_base = OTHER; note = sugar modification: 2'-O-methoxyethylribose; note = backbone modification: 5'-phosphorothioate
  modified_base 6: mod_base = OTHER; note = backbone modification: 5'-phosphorothioate; note = sugar modification: 2'-O-methoxyethylribose
  modified_base 7: mod_base = OTHER; note = thymine; note = backbone modification: 5'-phosphorothioate; note = sugar modification: 2'-O-methoxyethylribose
  modified_base 8: mod_base = OTHER; note = sugar modification: 2'-O-methoxyethylribose; note = backbone modification: 5'-phosphorothioate; note = thymine
  modified_base 9: mod_base = OTHER; mod_base = m5c; note = backbone modification: 5'-phosphorothioate; note = sugar modification: 2'-O-methoxyethylribose
  modified_base 10: mod_base = OTHER; note = backbone modification: 5'-phosphorothioate; note = sugar modification: 2'-O-methoxyethylribose
  modified_base 11: mod_base = OTHER; note = backbone modification: 5'-phosphorothioate; note = sugar modification: 2'-O-methoxyethylribose
  modified_base 12: mod_base = OTHER; mod_base = m5c; note = backbone modification: 5'-phosphorothioate; note = sugar modification: 2'-O-methoxyethylribose
  modified_base 13: mod_base = OTHER; note = sugar modification: 2'-O-methoxyethylribose; note = thymine; note = backbone modification: 5'-phosphorothioate
  modified_base 14: mod_base = OTHER; note = sugar modification: 2'-O-methoxyethylribose; note = backbone modification: 5'-phosphorothioate
  modified_base 15: mod_base = OTHER; note = thymine; note = sugar modification: 2'-O-methoxyethylribose; note = backbone modification: 5'-phosphorothioate
  modified_base 16: mod_base = OTHER; note = thymine; note = backbone modification: 5'-phosphorothioate; note = sugar modification: 2'-O-methoxyethylribose
  modified_base 17: mod_base = OTHER; note = sugar modification: 2'-O-methoxyethylribose; note = backbone modification: 5'-phosphorothioate
  modified_base 18: mod_base = OTHER; mod_base = m5c; note = sugar modification: 2'-O-methoxyethylribose
atttcattcaactgttgc

SEQ ID NO: 479 - RNA, 18 nt, synthetic construct
  source 1..18: mol_type = other RNA; note = Antisense oligonucleotide
  modified_base 1: mod_base = m5c; mod_base = OTHER; note = sugar modification: 2'-O-methoxyethylribose; note = backbone modification: 5'-phosphorothioate
  modified_base 2: mod_base = OTHER; note = backbone modification: 5'-phosphorothioate; note = sugar modification: 2'-O-methoxyethylribose
  modified_base 3: mod_base = OTHER; note = sugar modification: 2'-O-methoxyethylribose; note = thymine; note = backbone modification: 5'-phosphorothioate
  modified_base 4: mod_base = OTHER; note = backbone modification: 5'-phosphorothioate; note = sugar modification: 2'-O-methoxyethylribose; note = thymine
  modified_base 5: mod_base = OTHER; note = sugar modification: 2'-O-methoxyethylribose; note = thymine; note = backbone modification: 5'-phosphorothioate
  modified_base 6: mod_base = m5c; mod_base = OTHER; note = backbone modification: 5'-phosphorothioate; note = sugar modification: 2'-O-methoxyethylribose
  modified_base 7: mod_base = OTHER; note = sugar modification: 2'-O-methoxyethylribose; note = backbone modification: 5'-phosphorothioate
  modified_base 8: mod_base = OTHER; note = sugar modification: 2'-O-methoxyethylribose; note = backbone modification: 5'-phosphorothioate; note = thymine
  modified_base 9: mod_base = OTHER; note = backbone modification: 5'-phosphorothioate; note = thymine; note = sugar modification: 2'-O-methoxyethylribose
  modified_base 10: mod_base = m5c; mod_base = OTHER; note = sugar modification: 2'-O-methoxyethylribose; note = backbone modification: 5'-phosphorothioate
  modified_base 11: mod_base = OTHER; note = sugar modification: 2'-O-methoxyethylribose; note = backbone modification: 5'-phosphorothioate
  modified_base 12: mod_base = OTHER; note = backbone modification: 5'-phosphorothioate; note = sugar modification: 2'-O-methoxyethylribose
  modified_base 13: mod_base = OTHER; mod_base = m5c; note = sugar modification: 2'-O-methoxyethylribose; note = backbone modification: 5'-phosphorothioate
  modified_base 14: mod_base = OTHER; note = thymine; note = sugar modification: 2'-O-methoxyethylribose; note = backbone modification: 5'-phosphorothioate
  modified_base 15: mod_base = OTHER; note = sugar modification: 2'-O-methoxyethylribose; note = backbone modification: 5'-phosphorothioate
  modified_base 16: mod_base = OTHER; note = backbone modification: 5'-phosphorothioate; note = thymine; note = sugar modification: 2'-O-methoxyethylribose
  modified_base 17: mod_base = OTHER; note = thymine; note = backbone modification: 5'-phosphorothioate; note = sugar modification: 2'-O-methoxyethylribose
  modified_base 18: mod_base = OTHER; note = sugar modification: 2'-O-methoxyethylribose
catttcattcaactgttg

SEQ ID NO: 480 - RNA, 18 nt, synthetic construct
  source 1..18: mol_type = other RNA; note = Antisense oligonucleotide
  modified_base 1: mod_base = OTHER; note = sugar modification: 2'-O-methoxyethylribose; note = backbone modification: 5'-phosphorothioate
  modified_base 2: mod_base = OTHER; mod_base = m5c; note = backbone modification: 5'-phosphorothioate; note = sugar modification: 2'-O-methoxyethylribose
  modified_base 3: mod_base = OTHER; note = sugar modification: 2'-O-methoxyethylribose; note = backbone modification: 5'-phosphorothioate
  modified_base 4: mod_base = OTHER; note = backbone modification: 5'-phosphorothioate; note = sugar modification: 2'-O-methoxyethylribose; note = thymine
  modified_base 5: mod_base = OTHER; note = sugar modification: 2'-O-methoxyethylribose; note = thymine; note = backbone modification: 5'-phosphorothioate
  modified_base 6: mod_base = OTHER; note = backbone modification: 5'-phosphorothioate; note = sugar modification: 2'-O-methoxyethylribose; note = thymine
  modified_base 7: mod_base = m5c; mod_base = OTHER; note = backbone modification: 5'-phosphorothioate; note = sugar modification: 2'-O-methoxyethylribose
  modified_base 8: mod_base = OTHER; note = backbone modification: 5'-phosphorothioate; note = sugar modification: 2'-O-methoxyethylribose
  modified_base 9: mod_base = OTHER; note = backbone modification: 5'-phosphorothioate; note = thymine; note = sugar modification: 2'-O-methoxyethylribose
  modified_base 10: mod_base = OTHER; note = thymine; note = sugar modification: 2'-O-methoxyethylribose; note = backbone modification: 5'-phosphorothioate
  modified_base 11: mod_base = m5c; mod_base = OTHER; note = sugar modification: 2'-O-methoxyethylribose; note = backbone modification: 5'-phosphorothioate
  modified_base 12: mod_base = OTHER; note = sugar modification: 2'-O-methoxyethylribose; note = backbone modification: 5'-phosphorothioate
  modified_base 13: mod_base = OTHER; note = sugar modification: 2'-O-methoxyethylribose; note = backbone modification: 5'-phosphorothioate
  modified_base 14: mod_base = OTHER; mod_base = m5c; note = sugar modification: 2'-O-methoxyethylribose; note = backbone modification: 5'-phosphorothioate
  modified_base 15: mod_base = OTHER; note = sugar modification: 2'-O-methoxyethylribose; note = backbone modification: 5'-phosphorothioate; note = thymine
  modified_base 16: mod_base = OTHER; note = sugar modification: 2'-O-methoxyethylribose; note = backbone modification: 5'-phosphorothioate
  modified_base 17: mod_base = OTHER; note = backbone modification: 5'-phosphorothioate; note = thymine; note = sugar modification: 2'-O-methoxyethylribose
  modified_base 18: mod_base = OTHER; note = thymine; note = sugar modification: 2'-O-methoxyethylribose
acatttcattcaactgtt

SEQ ID NO: 481 - RNA, 18 nt, synthetic construct
  source 1..18: mol_type = other RNA; note = Antisense oligonucleotide
  modified_base 1: mod_base = OTHER; note = sugar modification: 2'-O-methoxyethylribose; note = backbone modification: 5'-phosphorothioate
  modified_base 2: mod_base = OTHER; note = sugar modification: 2'-O-methoxyethylribose; note = backbone modification: 5'-phosphorothioate
  modified_base 3: mod_base = m5c; mod_base = OTHER; note = sugar modification: 2'-O-methoxyethylribose; note = backbone modification: 5'-phosphorothioate
  modified_base 4: mod_base = OTHER; note = sugar modification: 2'-O-methoxyethylribose; note = backbone modification: 5'-phosphorothioate
  modified_base 5: mod_base = OTHER; note = sugar modification: 2'-O-methoxyethylribose; note = backbone modification: 5'-phosphorothioate; note = thymine
  modified_base 6: mod_base = OTHER; note = sugar modification: 2'-O-methoxyethylribose; note = thymine; note = backbone modification: 5'-phosphorothioate
  modified_base 7: mod_base = OTHER; note = thymine; note = sugar modification: 2'-O-methoxyethylribose; note = backbone modification: 5'-phosphorothioate
  modified_base 8: mod_base = OTHER; mod_base = m5c; note = backbone modification: 5'-phosphorothioate; note = sugar modification: 2'-O-methoxyethylribose
  modified_base 9: mod_base = OTHER; note = sugar modification: 2'-O-methoxyethylribose; note = backbone modification: 5'-phosphorothioate
  modified_base 10: mod_base = OTHER; note = thymine; note = sugar modification: 2'-O-methoxyethylribose; note = backbone modification: 5'-phosphorothioate
  modified_base 11: mod_base = OTHER; note = thymine; note = backbone modification: 5'-phosphorothioate; note = sugar modification: 2'-O-methoxyethylribose
  modified_base 12: mod_base = m5c; mod_base = OTHER; note = backbone modification: 5'-phosphorothioate; note = sugar modification: 2'-O-methoxyethylribose
  modified_base 13: mod_base = OTHER; note = sugar modification: 2'-O-methoxyethylribose; note = backbone modification: 5'-phosphorothioate
  modified_base 14: mod_base = OTHER; note = backbone modification: 5'-phosphorothioate; note = sugar modification: 2'-O-methoxyethylribose
  modified_base 15: mod_base = OTHER; mod_base = m5c; note = backbone modification: 5'-phosphorothioate; note = sugar modification: 2'-O-methoxyethylribose
  modified_base 16: mod_base = OTHER; note = thymine; note = backbone modification: 5'-phosphorothioate; note = sugar modification: 2'-O-methoxyethylribose
  modified_base 17: mod_base = OTHER; note = backbone modification: 5'-phosphorothioate; note = sugar modification: 2'-O-methoxyethylribose
  modified_base 18: mod_base = OTHER; note = sugar modification: 2'-O-methoxyethylribose; note = thymine
aacatttcattcaactgt

SEQ ID NO: 482 - RNA, 18 nt, synthetic construct
  source 1..18: mol_type = other RNA; note = Antisense oligonucleotide
  modified_base 1: mod_base = OTHER; note = thymine; note = backbone modification: 5'-phosphorothioate; note = sugar modification: 2'-O-methoxyethylribose
  modified_base 2: mod_base = OTHER; note = thymine; note = sugar modification: 2'-O-methoxyethylribose; note = backbone modification: 5'-phosphorothioate
  modified_base 3: mod_base = OTHER; note = sugar modification: 2'-O-methoxyethylribose; note = backbone modification: 5'-phosphorothioate
  modified_base 4: mod_base = OTHER; note = sugar modification: 2'-O-methoxyethylribose; note = backbone modification: 5'-phosphorothioate
  modified_base 5: mod_base = OTHER; mod_base = m5c; note = backbone modification: 5'-phosphorothioate; note = sugar modification: 2'-O-methoxyethylribose
  modified_base 6: mod_base = OTHER; note = sugar modification: 2'-O-methoxyethylribose; note = backbone modification: 5'-phosphorothioate
  modified_base 7: mod_base = OTHER; note = backbone modification: 5'-phosphorothioate; note = sugar modification: 2'-O-methoxyethylribose; note = thymine
  modified_base 8: mod_base = OTHER; note = sugar modification: 2'-O-methoxyethylribose; note = thymine; note = backbone modification: 5'-phosphorothioate
  modified_base 9: mod_base = OTHER; note = sugar modification: 2'-O-methoxyethylribose; note = backbone modification: 5'-phosphorothioate; note = thymine
  modified_base 10: mod_base = OTHER; mod_base = m5c; note = backbone modification: 5'-phosphorothioate; note = sugar modification: 2'-O-methoxyethylribose
  modified_base 11: mod_base = OTHER; note = backbone modification: 5'-phosphorothioate; note = sugar modification: 2'-O-methoxyethylribose
  modified_base 12: mod_base = OTHER; note = sugar modification: 2'-O-methoxyethylribose; note = backbone modification: 5'-phosphorothioate; note = thymine
  modified_base 13: mod_base = OTHER; note = thymine; note = backbone modification: 5'-phosphorothioate; note = sugar modification: 2'-O-methoxyethylribose
  modified_base 14: mod_base = m5c; mod_base = OTHER; note = backbone modification: 5'-phosphorothioate; note = sugar modification: 2'-O-methoxyethylribose
  modified_base 15: mod_base = OTHER; note = sugar modification: 2'-O-methoxyethylribose; note = backbone modification: 5'-phosphorothioate
  modified_base 16: mod_base = OTHER; note = sugar modification: 2'-O-methoxyethylribose; note = backbone modification: 5'-phosphorothioate
  modified_base 17: mod_base = OTHER; mod_base = m5c; note = sugar modification: 2'-O-methoxyethylribose; note = backbone modification: 5'-phosphorothioate
  modified_base 18: mod_base = OTHER; note = thymine; note = sugar modification: 2'-O-methoxyethylribose
ttaacatttcattcaact

SEQ ID NO: 483 - RNA, 18 nt, synthetic construct
  source 1..18: mol_type = other RNA; note = Antisense oligonucleotide
  modified_base 1: mod_base = OTHER; note = backbone modification: 5'-phosphorothioate; note = sugar modification: 2'-O-methoxyethylribose; note = thymine
  modified_base 2: mod_base = OTHER; note = backbone modification: 5'-phosphorothioate; note = thymine; note = sugar modification: 2'-O-methoxyethylribose
  modified_base 3: mod_base = OTHER; note = backbone modification: 5'-phosphorothioate; note = thymine; note = sugar modification: 2'-O-methoxyethylribose
  modified_base 4: mod_base = OTHER; note = backbone modification: 5'-phosphorothioate; note = sugar modification: 2'-O-methoxyethylribose
  modified_base 5: mod_base = OTHER; note = sugar modification: 2'-O-methoxyethylribose; note = backbone modification: 5'-phosphorothioate
  modified_base 6: mod_base = m5c; mod_base = OTHER; note = sugar modification: 2'-O-methoxyethylribose; note = backbone modification: 5'-phosphorothioate
  modified_base 7: mod_base = OTHER; note = sugar modification: 2'-O-methoxyethylribose; note = backbone modification: 5'-phosphorothioate
  modified_base 8: mod_base = OTHER; note = backbone modification: 5'-phosphorothioate; note = thymine; note = sugar modification: 2'-O-methoxyethylribose
  modified_base 9: mod_base = OTHER; note = backbone modification: 5'-phosphorothioate; note = thymine; note = sugar modification: 2'-O-methoxyethylribose
  modified_base 10: mod_base = OTHER; note = thymine; note = backbone modification: 5'-phosphorothioate; note = sugar modification: 2'-O-methoxyethylribose
  modified_base 11: mod_base = m5c; mod_base = OTHER; note = backbone modification: 5'-phosphorothioate; note = sugar modification: 2'-O-methoxyethylribose
  modified_base 12: mod_base = OTHER; note = sugar modification: 2'-O-methoxyethylribose; note = backbone modification: 5'-phosphorothioate
  modified_base 13: mod_base = OTHER; note = sugar modification: 2'-O-methoxyethylribose; note = thymine; note = backbone modification: 5'-phosphorothioate
  modified_base 14: mod_base = OTHER; note = sugar modification: 2'-O-methoxyethylribose; note = thymine; note = backbone modification: 5'-phosphorothioate
  modified_base 15: mod_base = m5c; mod_base = OTHER; note = backbone modification: 5'-phosphorothioate; note = sugar modification: 2'-O-methoxyethylribose
  modified_base 16: mod_base = OTHER; note = sugar modification: 2'-O-methoxyethylribose; note = backbone modification: 5'-phosphorothioate
  modified_base 17: mod_base = OTHER; note = backbone modification: 5'-phosphorothioate; note = sugar modification: 2'-O-methoxyethylribose
  modified_base 18: mod_base = m5c; mod_base = OTHER; note = sugar modification: 2'-O-methoxyethylribose
tttaacatttcattcaac

SEQ ID NO: 484 - RNA, 18 nt, synthetic construct
  source 1..18: mol_type = other RNA; note = Antisense oligonucleotide
  modified_base 1: mod_base = OTHER; mod_base = m5c; note = backbone modification: 5'-phosphorothioate; note = sugar modification: 2'-O-methoxyethylribose
  modified_base 2: mod_base = OTHER; note = backbone modification: 5'-phosphorothioate; note = sugar modification: 2'-O-methoxyethylribose; note = thymine
  modified_base 3: mod_base = OTHER; note = thymine; note = sugar modification: 2'-O-methoxyethylribose; note = backbone modification: 5'-phosphorothioate
  modified_base 4: mod_base = OTHER; note = sugar modification: 2'-O-methoxyethylribose; note = backbone modification: 5'-phosphorothioate; note = thymine
  modified_base 5: mod_base = OTHER; note = sugar modification: 2'-O-methoxyethylribose; note = backbone modification: 5'-phosphorothioate
  modified_base 6: mod_base = OTHER; note = backbone modification: 5'-phosphorothioate; note = sugar modification: 2'-O-methoxyethylribose
  modified_base 7: mod_base = m5c; mod_base = OTHER; note = sugar modification: 2'-O-methoxyethylribose; note = backbone modification: 5'-phosphorothioate
  modified_base 8: mod_base = OTHER; note = sugar modification: 2'-O-methoxyethylribose; note = backbone modification: 5'-phosphorothioate
  modified_base 9: mod_base = OTHER; note = backbone modification: 5'-phosphorothioate; note = sugar modification: 2'-O-methoxyethylribose; note = thymine
  modified_base 10: mod_base = OTHER; note = sugar modification: 2'-O-methoxyethylribose; note = thymine; note = backbone modification: 5'-phosphorothioate
  modified_base 11: mod_base = OTHER; note = thymine; note = sugar modification: 2'-O-methoxyethylribose; note = backbone modification: 5'-phosphorothioate
  modified_base 12: mod_base = OTHER; mod_base = m5c; note = sugar modification: 2'-O-methoxyethylribose; note = backbone modification: 5'-phosphorothioate
  modified_base 13: mod_base = OTHER; note = sugar modification: 2'-O-methoxyethylribose; note = backbone modification: 5'-phosphorothioate
  modified_base 14: mod_base = OTHER; note = backbone modification: 5'-phosphorothioate; note = sugar modification: 2'-O-methoxyethylribose; note = thymine
  modified_base 15: mod_base = OTHER; note = thymine; note = backbone modification: 5'-phosphorothioate; note = sugar modification: 2'-O-methoxyethylribose
  modified_base 16: mod_base = m5c; mod_base = OTHER; note = backbone modification: 5'-phosphorothioate; note = sugar modification: 2'-O-methoxyethylribose
  modified_base 17: mod_base = OTHER; note = sugar modification: 2'-O-methoxyethylribose; note = backbone modification: 5'-phosphorothioate
  modified_base 18: mod_base = OTHER; note = sugar modification: 2'-O-methoxyethylribose
ctttaacatttcattcaa

SEQ ID NO: 485 - RNA, 18 nt, synthetic construct
  source 1..18: mol_type = other RNA; note = Antisense oligonucleotide
  modified_base 1: mod_base = OTHER; mod_base = m5c; note = sugar modification: 2'-O-methoxyethylribose; note = backbone modification: 5'-phosphorothioate
  modified_base 2: mod_base = m5c; mod_base = OTHER; note = sugar modification: 2'-O-methoxyethylribose; note = backbone modification: 5'-phosphorothioate
  modified_base 3: mod_base = OTHER; note = sugar modification: 2'-O-methoxyethylribose; note = backbone modification: 5'-phosphorothioate; note = thymine
  modified_base 4: mod_base = OTHER; note = thymine; note = sugar modification: 2'-O-methoxyethylribose; note = backbone modification: 5'-phosphorothioate
  modified_base 5: mod_base = OTHER; note = sugar modification: 2'-O-methoxyethylribose; note = backbone modification: 5'-phosphorothioate; note = thymine
  modified_base 6: mod_base = OTHER; note = backbone modification: 5'-phosphorothioate; note = sugar modification: 2'-O-methoxyethylribose
  modified_base 7: mod_base = OTHER; note = sugar modification: 2'-O-methoxyethylribose; note = backbone modification: 5'-phosphorothioate
  modified_base 8: mod_base = OTHER; mod_base = m5c; note = backbone modification: 5'-phosphorothioate; note = sugar modification: 2'-O-methoxyethylribose
  modified_base 9: mod_base = OTHER; note = sugar modification: 2'-O-methoxyethylribose; note = backbone modification: 5'-phosphorothioate
  modified_base 10: mod_base = OTHER; note = sugar modification: 2'-O-methoxyethylribose; note = backbone modification: 5'-phosphorothioate; note = thymine
  modified_base 11: mod_base = OTHER; note = thymine; note = backbone modification: 5'-phosphorothioate; note = sugar modification: 2'-O-methoxyethylribose
  modified_base 12: mod_base = OTHER; note = sugar modification: 2'-O-methoxyethylribose; note = thymine; note = backbone modification: 5'-phosphorothioate
  modified_base 13: mod_base = m5c; mod_base = OTHER; note = backbone modification: 5'-phosphorothioate; note = sugar modification: 2'-O-methoxyethylribose
  modified_base 14: mod_base = OTHER; note = backbone modification: 5'-phosphorothioate; note = sugar modification: 2'-O-methoxyethylribose
  modified_base 15: mod_base = OTHER; note = backbone modification: 5'-phosphorothioate; note = thymine; note = sugar modification: 2'-O-methoxyethylribose
  modified_base 16: mod_base = OTHER; note = backbone modification: 5'-phosphorothioate; note = thymine; note = sugar modification: 2'-O-methoxyethylribose
  modified_base 17: mod_base = m5c; mod_base = OTHER; note = backbone modification: 5'-phosphorothioate; note = sugar modification: 2'-O-methoxyethylribose
  modified_base 18: mod_base = OTHER; note = sugar modification: 2'-O-methoxyethylribose
cctttaacatttcattca

SEQ ID NO: 486 - RNA, 18 nt, synthetic construct
  source 1..18: mol_type = other RNA; note = Antisense oligonucleotide
  modified_base 1: mod_base = OTHER; note = sugar modification: 2'-O-methoxyethylribose; note = backbone modification: 5'-phosphorothioate
  modified_base 2: mod_base = OTHER; note = thymine; note = sugar modification: 2'-O-methoxyethylribose; note = backbone modification: 5'-phosphorothioate
  modified_base 3: mod_base = OTHER; note = sugar modification: 2'-O-methoxyethylribose; note = thymine; note = backbone modification: 5'-phosphorothioate
  modified_base 4: mod_base = OTHER; note = backbone modification: 5'-phosphorothioate; note = sugar modification: 2'-O-methoxyethylribose
  modified_base 5: mod_base = OTHER; note = backbone modification: 5'-phosphorothioate; note = sugar modification: 2'-O-methoxyethylribose; note = thymine
  modified_base 6: mod_base = OTHER; note = backbone modification: 5'-phosphorothioate; note = sugar modification: 2'-O-methoxyethylribose
  modified_base 7: mod_base = OTHER; note = backbone modification: 5'-phosphorothioate; note = sugar modification: 2'-O-methoxyethylribose; note = thymine
  modified_base 8: mod_base = OTHER; note = sugar modification: 2'-O-methoxyethylribose; note = backbone modification: 5'-phosphorothioate; note = thymine
  modified_base 9: mod_base = OTHER; note = sugar modification: 2'-O-methoxyethylribose; note = backbone modification: 5'-phosphorothioate
  modified_base 10: mod_base = OTHER; note = sugar modification: 2'-O-methoxyethylribose; note = backbone modification: 5'-phosphorothioate
  modified_base 11: mod_base = OTHER; note = sugar modification: 2'-O-methoxyethylribose; note = backbone modification: 5'-phosphorothioate
  modified_base 12: mod_base = OTHER; note = thymine; note = backbone modification: 5'-phosphorothioate; note = sugar modification: 2'-O-methoxyethylribose
  modified_base 13: mod_base = OTHER; mod_base = m5c; note = backbone modification: 5'-phosphorothioate; note = sugar modification: 2'-O-methoxyethylribose
  modified_base 14: mod_base = OTHER; mod_base = m5c; note = sugar modification: 2'-O-methoxyethylribose; note = backbone modification: 5'-phosphorothioate
  modified_base 15: mod_base = OTHER; note = backbone modification: 5'-phosphorothioate; note = sugar modification: 2'-O-methoxyethylribose; note = thymine
  modified_base 16: mod_base = OTHER; note = backbone modification: 5'-phosphorothioate; note = thymine; note = sugar modification: 2'-O-methoxyethylribose
  modified_base 17: mod_base = OTHER; note = thymine; note = sugar modification: 2'-O-methoxyethylribose; note = backbone modification: 5'-phosphorothioate
  modified_base 18: mod_base = OTHER; note = sugar modification: 2'-O-methoxyethylribose
attgtgttgaatccttta

SEQ ID NO: 487 - RNA, 18 nt, synthetic construct
  source 1..18: mol_type = other RNA; note = Antisense oligonucleotide
  modified_base 1: mod_base = m5c; mod_base = OTHER; note = sugar modification: 2'-O-methoxyethylribose; note = backbone modification: 5'-phosphorothioate
  modified_base 2: mod_base = OTHER; note = backbone modification: 5'-phosphorothioate; note = sugar modification: 2'-O-methoxyethylribose
  modified_base 3: mod_base = OTHER; note = backbone modification: 5'-phosphorothioate; note = sugar modification: 2'-O-methoxyethylribose; note = thymine
  modified_base 4: mod_base = OTHER; note = backbone modification: 5'-phosphorothioate; note = thymine; note = sugar modification: 2'-O-methoxyethylribose
  modified_base 5: mod_base = OTHER; note = backbone modification: 5'-phosphorothioate; note = sugar modification: 2'-O-methoxyethylribose
  modified_base 6: mod_base = OTHER; note = thymine; note = backbone modification: 5'-phosphorothioate; note = sugar modification: 2'-O-methoxyethylribose
  modified_base 7: mod_base = OTHER; note = backbone modification: 5'-phosphorothioate; note = sugar modification: 2'-O-methoxyethylribose
  modified_base 8: mod_base = OTHER; note = backbone modification: 5'-phosphorothioate; note = sugar modification: 2'-O-methoxyethylribose; note = thymine
  modified_base 9: mod_base = OTHER; note = sugar modification: 2'-O-methoxyethylribose; note = thymine; note = backbone modification: 5'-phosphorothioate
  modified_base 10: mod_base = OTHER; note = sugar modification: 2'-O-methoxyethylribose; note = backbone modification: 5'-phosphorothioate
  modified_base 11: mod_base = OTHER; note = backbone modification: 5'-phosphorothioate; note = sugar modification: 2'-O-methoxyethylribose
  modified_base 12: mod_base = OTHER; note = backbone modification: 5'-phosphorothioate; note = sugar modification: 2'-O-methoxyethylribose
  modified_base 13: mod_base = OTHER; note = sugar modification: 2'-O-methoxyethylribose; note = thymine; note = backbone modification: 5'-phosphorothioate
  modified_base 14: mod_base = OTHER; mod_base = m5c; note = backbone modification: 5'-phosphorothioate; note = sugar modification: 2'-O-methoxyethylribose
  modified_base 15: mod_base = m5c; mod_base = OTHER; note = backbone modification: 5'-phosphorothioate; note = sugar modification: 2'-O-methoxyethylribose
  modified_base 16: mod_base = OTHER; note = sugar modification: 2'-O-methoxyethylribose; note = thymine; note = backbone modification: 5'-phosphorothioate
  modified_base 17: mod_base = OTHER; note = sugar modification: 2'-O-methoxyethylribose; note = thymine; note = backbone modification: 5'-phosphorothioate
  modified_base 18: mod_base = OTHER; note = thymine; note = sugar modification: 2'-O-methoxyethylribose
cattgtgttgaatccttt

SEQ ID NO: 488 - RNA, 18 nt, synthetic construct
  source 1..18: mol_type = other RNA; note = Antisense oligonucleotide
  modified_base 1: mod_base = m5c; mod_base = OTHER; note = backbone modification: 5'-phosphorothioate; note = sugar modification: 2'-O-methoxyethylribose
  modified_base 2: mod_base = OTHER; mod_base = m5c; note = sugar modification: 2'-O-methoxyethylribose; note = backbone modification: 5'-phosphorothioate
  modified_base 3: mod_base = OTHER; note = sugar modification: 2'-O-methoxyethylribose; note = backbone modification: 5'-phosphorothioate
  modified_base 4: mod_base = OTHER; note = backbone modification: 5'-phosphorothioate; note = thymine; note = sugar modification: 2'-O-methoxyethylribose
  modified_base 5: mod_base = OTHER; note = thymine; note = sugar modification: 2'-O-methoxyethylribose; note = backbone modification: 5'-phosphorothioate
  modified_base 6: mod_base = OTHER; note = sugar modification: 2'-O-methoxyethylribose; note = backbone modification: 5'-phosphorothioate
  modified_base 7: mod_base = OTHER; note = sugar modification: 2'-O-methoxyethylribose; note = thymine; note = backbone modification: 5'-phosphorothioate
  modified_base 8: mod_base = OTHER; note = sugar modification: 2'-O-methoxyethylribose; note = backbone modification: 5'-phosphorothioate
  modified_base 9: mod_base = OTHER; note = thymine; note = backbone modification: 5'-phosphorothioate; note = sugar modification: 2'-O-methoxyethylribose
  modified_base 10: mod_base = OTHER; note = sugar modification: 2'-O-methoxyethylribose; note = backbone modification: 5'-phosphorothioate; note = thymine
  modified_base 11: mod_base = OTHER; note = sugar modification: 2'-O-methoxyethylribose; note = backbone modification: 5'-phosphorothioate
  modified_base 12: mod_base = OTHER; note = backbone modification: 5'-phosphorothioate; note = sugar modification: 2'-O-methoxyethylribose
  modified_base 13: mod_base = OTHER; note = backbone modification: 5'-phosphorothioate; note = sugar modification: 2'-O-methoxyethylribose
  modified_base 14: mod_base = OTHER; note = backbone modification: 5'-phosphorothioate; note = sugar modification: 2'-O-methoxyethylribose; note = thymine
  modified_base 15: mod_base = m5c; mod_base = OTHER; note = backbone modification: 5'-phosphorothioate; note = sugar modification: 2'-O-methoxyethylribose
  modified_base 16: mod_base = m5c; mod_base = OTHER; note = sugar modification: 2'-O-methoxyethylribose; note = backbone modification: 5'-phosphorothioate
  modified_base 17: mod_base = OTHER; note = sugar modification: 2'-O-methoxyethylribose; note = thymine; note = backbone modification: 5'-phosphorothioate
  modified_base 18: mod_base = OTHER; note = sugar modification: 2'-O-methoxyethylribose; note = thymine
ccattgtgttgaatcctt

SEQ ID NO: 489 - RNA, 18 nt, synthetic construct
  source 1..18: mol_type = other RNA; note = Antisense oligonucleotide
  modified_base 1: mod_base = OTHER; note = sugar modification: 2'-O-methoxyethylribose; note = backbone modification: 5'-phosphorothioate
  modified_base 2: mod_base = OTHER; mod_base = m5c; note = backbone modification: 5'-phosphorothioate; note = sugar modification: 2'-O-methoxyethylribose
  modified_base 3: mod_base = m5c; mod_base = OTHER; note = sugar modification: 2'-O-methoxyethylribose; note = backbone modification: 5'-phosphorothioate
  modified_base 4: mod_base = OTHER; note = sugar modification: 2'-O-methoxyethylribose; note = backbone modification: 5'-phosphorothioate
  modified_base 5: mod_base = OTHER; note = backbone modification: 5'-phosphorothioate; note = sugar modification: 2'-O-methoxyethylribose; note = thymine
  modified_base 6: mod_base = OTHER; note = backbone modification: 5'-phosphorothioate; note = thymine; note = sugar modification: 2'-O-methoxyethylribose
  modified_base 7: mod_base = OTHER; note = sugar modification: 2'-O-methoxyethylribose; note = backbone modification: 5'-phosphorothioate
  modified_base 8: mod_base = OTHER; note = sugar modification: 2'-O-methoxyethylribose; note = thymine; note = backbone modification: 5'-phosphorothioate
  modified_base 9: mod_base = OTHER; note = backbone modification: 5'-phosphorothioate; note = sugar modification: 2'-O-methoxyethylribose
  modified_base 10: mod_base = OTHER; note = backbone modification: 5'-phosphorothioate; note = thymine; note = sugar modification: 2'-O-methoxyethylribose
  modified_base 11: mod_base = OTHER; note = sugar modification: 2'-O-methoxyethylribose; note = thymine; note = backbone modification: 5'-phosphorothioate
  modified_base 12: mod_base = OTHER; note = backbone modification: 5'-phosphorothioate; note = sugar modification: 2'-O-methoxyethylribose
  modified_base 13: mod_base = OTHER; note = sugar modification: 2'-O-methoxyethylribose; note = backbone modification: 5'-phosphorothioate
  modified_base 14: mod_base = OTHER; note = sugar modification: 2'-O-methoxyethylribose; note = backbone modification: 5'-phosphorothioate
  modified_base 15: mod_base = OTHER; note = sugar modification: 2'-O-methoxyethylribose; note = backbone modification: 5'-phosphorothioate; note = thymine
  modified_base 16: mod_base = m5c; mod_base = OTHER; note = sugar modification: 2'-O-methoxyethylribose; note = backbone modification: 5'-phosphorothioate
  modified_base 17: mod_base = OTHER; mod_base = m5c; note = sugar modification: 2'-O-methoxyethylribose; note = backbone modification: 5'-phosphorothioate
  modified_base 18: mod_base = OTHER; note = thymine; note = sugar modification: 2'-O-methoxyethylribose
gccattgtgttgaatcct

SEQ ID NO: 490 - RNA, 18 nt, synthetic construct
  source 1..18: mol_type = other RNA; note = Antisense oligonucleotide
  modified_base 1: mod_base = m5c; mod_base = OTHER; note = backbone modification: 5'-phosphorothioate; note = sugar modification: 2'-O-methoxyethylribose
  modified_base 2: mod_base = OTHER; note = backbone modification: 5'-phosphorothioate; note = sugar modification: 2'-O-methoxyethylribose
  modified_base 3: mod_base = OTHER; note = backbone modification: 5'-phosphorothioate; note = sugar modification: 2'-O-methoxyethylribose
  modified_base 4: mod_base = OTHER; mod_base = m5c; note = backbone modification: 5'-phosphorothioate; note = sugar modification: 2'-O-methoxyethylribose
  modified_base 5: mod_base = m5c; mod_base = OTHER; note = sugar modification: 2'-O-methoxyethylribose; note = backbone modification: 5'-phosphorothioate
  modified_base 6: mod_base = OTHER; note = backbone modification: 5'-phosphorothioate; note = sugar modification: 2'-O-methoxyethylribose
  modified_base 7: mod_base = OTHER; note = thymine; note = backbone modification: 5'-phosphorothioate; note = sugar modification: 2'-O-methoxyethylribose
  modified_base 8: mod_base = OTHER; note = backbone modification: 5'-phosphorothioate; note = sugar modification: 2'-O-methoxyethylribose; note = thymine
  modified_base 9: mod_base = OTHER; note = backbone modification: 5'-phosphorothioate; note = sugar modification: 2'-O-methoxyethylribose
  modified_base 10: mod_base = OTHER; note = backbone modification: 5'-phosphorothioate; note = thymine; note = sugar modification: 2'-O-methoxyethylribose
  modified_base 11: mod_base = OTHER; note = backbone modification: 5'-phosphorothioate; note = sugar modification: 2'-O-methoxyethylribose
  modified_base 12: mod_base = OTHER; note = backbone modification: 5'-phosphorothioate; note = sugar modification: 2'-O-methoxyethylribose; note = thymine
  modified_base 13: mod_base = OTHER; note = backbone modification: 5'-phosphorothioate; note = sugar modification: 2'-O-methoxyethylribose; note = thymine
  modified_base 14: mod_base = OTHER; note = sugar modification: 2'-O-methoxyethylribose; note = backbone modification: 5'-phosphorothioate
  modified_base 15: mod_base = OTHER; note = sugar modification: 2'-O-methoxyethylribose; note = backbone modification: 5'-phosphorothioate
  modified_base 16: mod_base = OTHER; note = sugar modification: 2'-O-methoxyethylribose; note = backbone modification: 5'-phosphorothioate
  modified_base 17: mod_base = OTHER; note = thymine; note = backbone modification: 5'-phosphorothioate; note = sugar modification: 2'-O-methoxyethylribose
  modified_base 18: mod_base = m5c; mod_base = OTHER; note = sugar modification: 2'-O-methoxyethylribose
cagccattgtgttgaatc

SEQ ID NO: 491 - RNA, 18 nt, synthetic construct
  source 1..18: mol_type = other RNA; note = Antisense oligonucleotide
  modified_base 1: mod_base = OTHER; mod_base = m5c; note = backbone modification: 5'-phosphorothioate; note = sugar modification: 2'-O-methoxyethylribose
  modified_base 2: mod_base = OTHER; mod_base = m5c; note = backbone modification: 5'-phosphorothioate; note = sugar modification: 2'-O-methoxyethylribose
  modified_base 3: mod_base = OTHER; note = sugar modification: 2'-O-methoxyethylribose; note = backbone modification: 5'-phosphorothioate
  modified_base 4: mod_base = OTHER; note = backbone modification: 5'-phosphorothioate; note = sugar modification: 2'-O-methoxyethylribose
  modified_base 5: mod_base = m5c; mod_base = OTHER; note = sugar modification: 2'-O-methoxyethylribose; note = backbone modification: 5'-phosphorothioate
  modified_base 6: mod_base = m5c; mod_base = OTHER; note = backbone modification: 5'-phosphorothioate; note = sugar modification: 2'-O-methoxyethylribose
  modified_base 7: mod_base = OTHER; note = sugar modification: 2'-O-methoxyethylribose; note = backbone modification: 5'-phosphorothioate
  modified_base 8: mod_base = OTHER; note = sugar modification: 2'-O-methoxyethylribose; note = backbone modification: 5'-phosphorothioate; note = thymine
  modified_base 9: mod_base = OTHER; note = sugar modification: 2'-O-methoxyethylribose; note = thymine; note = backbone modification: 5'-phosphorothioate
  modified_base 10: mod_base = OTHER; note = backbone modification: 5'-phosphorothioate; note = sugar modification: 2'-O-methoxyethylribose
  modified_base 11: mod_base = OTHER; note = backbone modification: 5'-phosphorothioate; note = sugar modification: 2'-O-methoxyethylribose; note = thymine
  modified_base 12: mod_base = OTHER; note = sugar modification: 2'-O-methoxyethylribose; note = backbone modification: 5'-phosphorothioate
  modified_base 13: mod_base = OTHER; note = backbone modification: 5'-phosphorothioate; note = sugar modification: 2'-O-methoxyethylribose; note = thymine
  modified_base 14: mod_base = OTHER; note = thymine; note = backbone modification: 5'-phosphorothioate; note = sugar modification: 2'-O-methoxyethylribose
  modified_base 15: mod_base = OTHER; note = backbone modification: 5'-phosphorothioate; note = sugar modification: 2'-O-methoxyethylribose
  modified_base 16: mod_base = OTHER; note = sugar modification: 2'-O-methoxyethylribose; note = backbone modification: 5'-phosphorothioate
  modified_base 17: mod_base = OTHER; note = backbone modification: 5'-phosphorothioate; note = sugar modification: 2'-O-methoxyethylribose
  modified_base 18: mod_base = OTHER; note = sugar modification: 2'-O-methoxyethylribose; note = thymine
ccagccattgtgttgaat

SEQ ID NO: 492 - RNA, 18 nt, synthetic construct
  source 1..18: mol_type = other RNA; note = Antisense oligonucleotide
  modified_base 1: mod_base = OTHER; note = thymine; note = backbone modification: 5'-phosphorothioate; note = sugar modification: 2'-O-methoxyethylribose
  modified_base 2: mod_base = m5c; mod_base = OTHER; note = sugar modification: 2'-O-methoxyethylribose; note = backbone modification: 5'-phosphorothioate
  modified_base 3: mod_base = OTHER; mod_base = m5c; note = sugar modification: 2'-O-methoxyethylribose; note = backbone modification: 5'-phosphorothioate
  modified_base 4: mod_base = OTHER; note = backbone modification: 5'-phosphorothioate; note = sugar modification: 2'-O-methoxyethylribose
  modified_base 5: mod_base = OTHER; note = backbone modification: 5'-phosphorothioate; note = sugar modification: 2'-O-methoxyethylribose
  modified_base 6: mod_base = m5c; mod_base = OTHER; note = backbone modification: 5'-phosphorothioate; note = sugar modification: 2'-O-methoxyethylribose
  modified_base 7: mod_base = m5c; mod_base = OTHER; note = backbone modification: 5'-phosphorothioate; note = sugar modification: 2'-O-methoxyethylribose
  modified_base 8: mod_base = OTHER; note = sugar modification: 2'-O-methoxyethylribose; note = backbone modification: 5'-phosphorothioate
  modified_base 9: mod_base = OTHER; note = backbone modification: 5'-phosphorothioate; note = sugar modification: 2'-O-methoxyethylribose; note = thymine
  modified_base 10: mod_base = OTHER; note = sugar modification: 2'-O-methoxyethylribose; note = thymine; note = backbone modification: 5'-phosphorothioate
  modified_base 11: mod_base = OTHER; note = backbone modification: 5'-phosphorothioate; note = sugar modification: 2'-O-methoxyethylribose
  modified_base 12: mod_base = OTHER; note = backbone modification: 5'-phosphorothioate; note = sugar modification: 2'-O-methoxyethylribose; note = thymine
  modified_base 13: mod_base = OTHER; note = backbone modification: 5'-phosphorothioate; note = sugar modification: 2'-O-methoxyethylribose
  modified_base 14: mod_base = OTHER; note = backbone modification: 5'-phosphorothioate; note = thymine; note = sugar modification: 2'-O-methoxyethylribose
  modified_base 15: mod_base = OTHER; note = backbone modification: 5'-phosphorothioate; note = sugar modification: 2'-O-methoxyethylribose; note = thymine
  modified_base 16: mod_base = OTHER; note = sugar modification: 2'-O-methoxyethylribose; note = backbone modification: 5'-phosphorothioate
  modified_base 17: mod_base = OTHER; note = backbone modification: 5'-phosphorothioate; note = sugar modification: 2'-O-methoxyethylribose
  modified_base 18: mod_base = OTHER; note = sugar modification: 2'-O-methoxyethylribose
tccagccattgtgttgaa

SEQ ID NO: 493 - RNA, 18 nt, synthetic construct
  source 1..18: mol_type = other RNA; note = Antisense oligonucleotide
  modified_base 1: mod_base = OTHER; note = sugar modification: 2'-O-methoxyethylribose; note = thymine; note = backbone modification: 5'-phosphorothioate
  modified_base 2: mod_base = OTHER; note = thymine; note = backbone modification: 5'-phosphorothioate; note = sugar modification: 2'-O-methoxyethylribose
  modified_base 3: mod_base = OTHER; mod_base = m5c; note = backbone modification: 5'-phosphorothioate; note = sugar modification: 2'-O-methoxyethylribose
  modified_base 4: mod_base = m5c; mod_base = OTHER; note = sugar modification: 2'-O-methoxyethylribose; note = backbone modification: 5'-phosphorothioate
  modified_base 5: mod_base = OTHER; note = sugar modification: 2'-O-methoxyethylribose; note = backbone modification: 5'-phosphorothioate
  modified_base 6: mod_base = OTHER; note = backbone modification: 5'-phosphorothioate; note = sugar modification: 2'-O-methoxyethylribose
  modified_base 7: mod_base = OTHER; mod_base = m5c; note = sugar modification: 2'-O-methoxyethylribose; note = backbone modification: 5'-phosphorothioate
  modified_base 8: mod_base = OTHER; mod_base = m5c; note = backbone modification: 5'-phosphorothioate; note = sugar modification: 2'-O-methoxyethylribose
  modified_base 9: mod_base = OTHER; note = backbone modification: 5'-phosphorothioate; note = sugar modification: 2'-O-methoxyethylribose
  modified_base 10: mod_base = OTHER; note = sugar modification: 2'-O-methoxyethylribose; note = backbone modification: 5'-phosphorothioate; note = thymine
  modified_base 11: mod_base = OTHER; note = thymine; note = sugar modification: 2'-O-methoxyethylribose; note = backbone modification: 5'-phosphorothioate
  modified_base 12: mod_base = OTHER; note = sugar modification: 2'-O-methoxyethylribose; note = backbone modification: 5'-phosphorothioate
  modified_base 13: mod_base = OTHER; note = thymine; note = sugar modification: 2'-O-methoxyethylribose; note = backbone modification: 5'-phosphorothioate
  modified_base 14: mod_base = OTHER; note = backbone modification: 5'-phosphorothioate; note = sugar modification: 2'-O-methoxyethylribose
  modified_base 15: mod_base = OTHER; note = sugar modification: 2'-O-methoxyethylribose; note = thymine; note = backbone modification: 5'-phosphorothioate
  modified_base 16: mod_base = OTHER; note = backbone modification: 5'-phosphorothioate; note = sugar modification: 2'-O-methoxyethylribose; note = thymine
  modified_base 17: mod_base = OTHER; note = backbone modification: 5'-phosphorothioate; note = sugar modification: 2'-O-methoxyethylribose
  modified_base 18: mod_base = OTHER; note = sugar modification: 2'-O-methoxyethylribose
ttccagccattgtgttga

SEQ ID NO: 494 - RNA, 18 nt, synthetic construct
  source 1..18: mol_type = other RNA; note = Antisense oligonucleotide
  modified_base 1: mod_base = OTHER; note = sugar modification: 2'-O-methoxyethylribose; note = backbone modification: 5'-phosphorothioate
  modified_base 2: mod_base = m5c; mod_base = OTHER; note = sugar modification: 2'-O-methoxyethylribose; note = backbone modification: 5'-phosphorothioate
  modified_base 3: mod_base = OTHER; note = backbone modification: 5'-phosphorothioate; note = thymine; note = sugar modification: 2'-O-methoxyethylribose
  modified_base 4: mod_base = OTHER; note = sugar modification: 2'-O-methoxyethylribose; note = thymine; note = backbone modification: 5'-phosphorothioate
  modified_base 5: mod_base = m5c; mod_base = OTHER; note = sugar modification: 2'-O-methoxyethylribose; note = backbone modification: 5'-phosphorothioate
  modified_base 6: mod_base = OTHER; mod_base = m5c; note = sugar modification: 2'-O-methoxyethylribose; note = backbone modification: 5'-phosphorothioate
  modified_base 7: mod_base = OTHER; note = backbone modification: 5'-phosphorothioate; note = sugar modification: 2'-O-methoxyethylribose
  modified_base 8: mod_base = OTHER; note = backbone modification: 5'-phosphorothioate; note = sugar modification: 2'-O-methoxyethylribose
  modified_base 9: mod_base = m5c; mod_base = OTHER; note = sugar modification: 2'-O-methoxyethylribose; note = backbone modification: 5'-phosphorothioate
  modified_base 10: mod_base = m5c; mod_base = OTHER; note = backbone modification: 5'-phosphorothioate; note = sugar modification: 2'-O-methoxyethylribose
  modified_base 11: mod_base = OTHER; note = sugar modification: 2'-O-methoxyethylribose; note = backbone modification: 5'-phosphorothioate
  modified_base 12: mod_base = OTHER; note = thymine; note = sugar modification: 2'-O-methoxyethylribose; note = backbone modification: 5'-phosphorothioate
  modified_base 13: mod_base = OTHER; note = backbone modification: 5'-phosphorothioate; note = thymine; note = sugar modification: 2'-O-methoxyethylribose
  modified_base 14: mod_base = OTHER; note = backbone modification: 5'-phosphorothioate; note = sugar modification: 2'-O-methoxyethylribose
  modified_base 15: mod_base = OTHER; note = sugar modification: 2'-O-methoxyethylribose; note = backbone modification: 5'-phosphorothioate; note = thymine
  modified_base 16: mod_base = OTHER; note = backbone modification: 5'-phosphorothioate; note = sugar modification: 2'-O-methoxyethylribose
  modified_base 17: mod_base = OTHER; note = backbone modification: 5'-phosphorothioate; note = sugar modification: 2'-O-methoxyethylribose; note = thymine
  modified_base 18: mod_base = OTHER; note = sugar modification: 2'-O-methoxyethylribose; note = thymine
gcttccagccattgtgtt

SEQ ID NO: 495 - RNA, 18 nt, synthetic construct
  source 1..18: mol_type = other RNA; note = Antisense oligonucleotide
  modified_base 1: mod_base = OTHER; note = sugar modification: 2'-O-methoxyethylribose; note = backbone modification: 5'-phosphorothioate
  modified_base 2: mod_base = OTHER; note = sugar modification: 2'-O-methoxyethylribose; note = backbone modification: 5'-phosphorothioate
  modified_base 3: mod_base = OTHER; mod_base = m5c; note = sugar modification: 2'-O-methoxyethylribose; note = backbone modification: 5'-phosphorothioate
  modified_base 4: mod_base = OTHER; note = thymine; note = sugar modification: 2'-O-methoxyethylribose; note = backbone modification: 5'-phosphorothioate
  modified_base 5: mod_base = OTHER; note = backbone modification: 5'-phosphorothioate; note = sugar modification: 2'-O-methoxyethylribose; note = thymine
  modified_base 6: mod_base = OTHER; mod_base = m5c; note = backbone modification: 5'-phosphorothioate; note = sugar modification: 2'-O-methoxyethylribose
  modified_base 7: mod_base = OTHER; mod_base = m5c; note = backbone modification: 5'-phosphorothioate; note = sugar modification: 2'-O-methoxyethylribose
  modified_base 8: mod_base = OTHER; note = sugar modification: 2'-O-methoxyethylribose; note = backbone modification: 5'-phosphorothioate
  modified_base 9: mod_base = OTHER; note = backbone modification: 5'-phosphorothioate; note = sugar modification: 2'-O-methoxyethylribose
  modified_base 10: mod_base = m5c; mod_base = OTHER; note = sugar modification: 2'-O-methoxyethylribose; note = backbone modification: 5'-phosphorothioate
  modified_base 11: mod_base = m5c; mod_base = OTHER; note = backbone modification: 5'-phosphorothioate; note = sugar modification: 2'-O-methoxyethylribose
  modified_base 12: mod_base = OTHER; note = sugar modification: 2'-O-methoxyethylribose; note = backbone modification: 5'-phosphorothioate
  modified_base 13: mod_base = OTHER; note = thymine; note = sugar modification: 2'-O-methoxyethylribose; note = backbone modification: 5'-phosphorothioate
  modified_base 14: mod_base = OTHER; note = thymine; note = backbone modification: 5'-phosphorothioate; note = sugar modification: 2'-O-methoxyethylribose
  modified_base 15: mod_base = OTHER; note = backbone modification: 5'-phosphorothioate; note = sugar modification: 2'-O-methoxyethylribose
  modified_base 16: mod_base = OTHER; note = sugar modification: 2'-O-methoxyethylribose; note = thymine; note = backbone modification: 5'-phosphorothioate
  modified_base 17: mod_base = OTHER; note = sugar modification: 2'-O-methoxyethylribose; note = backbone modification: 5'-phosphorothioate
  modified_base 18: mod_base = OTHER; note = thymine; note = sugar modification: 2'-O-methoxyethylribose
agcttccagccattgtgt

SEQ ID NO: 496 - RNA, 18 nt, synthetic construct
  source 1..18: mol_type = other RNA; note = Antisense oligonucleotide
  modified_base 1: mod_base = OTHER; note = sugar modification: 2'-O-methoxyethylribose; note = backbone modification: 5'-phosphorothioate; note = thymine
  modified_base 2: mod_base = OTHER; note = backbone modification: 5'-phosphorothioate; note = sugar modification: 2'-O-methoxyethylribose
  modified_base 3: mod_base = OTHER; note = sugar modification: 2'-O-methoxyethylribose; note = backbone modification: 5'-phosphorothioate
  modified_base 4: mod_base = OTHER; mod_base = m5c; note = sugar modification: 2'-O-methoxyethylribose; note = backbone modification: 5'-phosphorothioate
  modified_base 5: mod_base = OTHER; note = backbone modification: 5'-phosphorothioate; note = thymine; note = sugar modification: 2'-O-methoxyethylribose
  modified_base 6: mod_base = OTHER; note = backbone modification: 5'-phosphorothioate; note = sugar modification: 2'-O-methoxyethylribose; note = thymine
  modified_base 7: mod_base = m5c; mod_base = OTHER; note = backbone modification: 5'-phosphorothioate; note = sugar modification: 2'-O-methoxyethylribose
  modified_base 8: mod_base = OTHER; mod_base = m5c; note = backbone modification: 5'-phosphorothioate; note = sugar modification: 2'-O-methoxyethylribose
  modified_base 9: mod_base = OTHER; note = sugar modification: 2'-O-methoxyethylribose; note = backbone modification: 5'-phosphorothioate
  modified_base 10: mod_base = OTHER; note = sugar modification: 2'-O-methoxyethylribose; note = backbone modification: 5'-phosphorothioate
  modified_base 11: mod_base = m5c; mod_base = OTHER; note = backbone modification: 5'-phosphorothioate; note = sugar modification: 2'-O-methoxyethylribose
  modified_base 12: mod_base = m5c; mod_base = OTHER; note = sugar modification: 2'-O-methoxyethylribose; note = backbone modification: 5'-phosphorothioate
  modified_base 13: mod_base = OTHER; note = backbone modification: 5'-phosphorothioate; note = sugar modification: 2'-O-methoxyethylribose
  modified_base 14: mod_base = OTHER; note = thymine; note = backbone modification: 5'-phosphorothioate; note = sugar modification: 2'-O-methoxyethylribose
  modified_base 15: mod_base = OTHER; note = thymine; note = sugar modification: 2'-O-methoxyethylribose; note = backbone modification: 5'-phosphorothioate
  modified_base 16: mod_base = OTHER; note = sugar modification: 2'-O-methoxyethylribose; note = backbone modification: 5'-phosphorothioate
  modified_base 17: mod_base = OTHER; note = backbone modification: 5'-phosphorothioate; note = sugar modification: 2'-O-methoxyethylribose; note = thymine
  modified_base 18: mod_base = OTHER; note = sugar modification: 2'-O-methoxyethylribose
tagcttccagccattgtg

SEQ ID NO: 497 - RNA, 18 nt, synthetic construct
  source 1..18: mol_type = other RNA; note = Antisense oligonucleotide
  modified_base 1: mod_base = OTHER; note = backbone modification: 5'-phosphorothioate; note = sugar modification: 2'-O-methoxyethylribose; note = thymine
  modified_base 2: mod_base = OTHER; note = sugar modification: 2'-O-methoxyethylribose; note = backbone modification: 5'-phosphorothioate; note = thymine
  modified_base 3: mod_base = OTHER; note = backbone modification: 5'-phosphorothioate; note = sugar modification: 2'-O-methoxyethylribose
  modified_base 4: mod_base = OTHER; note = sugar modification: 2'-O-methoxyethylribose; note = backbone modification: 5'-phosphorothioate
  modified_base 5: mod_base = OTHER; mod_base = m5c; note = sugar modification: 2'-O-methoxyethylribose; note = backbone modification: 5'-phosphorothioate
  modified_base 6: mod_base = OTHER; note = sugar modification: 2'-O-methoxyethylribose; note = backbone modification: 5'-phosphorothioate; note = thymine
  modified_base 7: mod_base = OTHER; note = sugar modification: 2'-O-methoxyethylribose; note = thymine; note = backbone modification: 5'-phosphorothioate
  modified_base 8: mod_base = m5c; mod_base = OTHER; note = backbone modification: 5'-phosphorothioate; note = sugar modification: 2'-O-methoxyethylribose
  modified_base 9: mod_base = OTHER; mod_base = m5c; note = backbone modification: 5'-phosphorothioate; note = sugar modification: 2'-O-methoxyethylribose
  modified_base 10: mod_base = OTHER; note = backbone modification: 5'-phosphorothioate; note = sugar modification: 2'-O-methoxyethylribose
  modified_base 11: mod_base = OTHER; note = sugar modification: 2'-O-methoxyethylribose; note = backbone modification: 5'-phosphorothioate
  modified_base 12: mod_base = OTHER; mod_base = m5c; note = backbone modification: 5'-phosphorothioate; note = sugar modification: 2'-O-methoxyethylribose
  modified_base 13: mod_base = m5c; mod_base = OTHER; note = backbone modification: 5'-phosphorothioate; note = sugar modification: 2'-O-methoxyethylribose
  modified_base 14: mod_base = OTHER; note = backbone modification: 5'-phosphorothioate; note = sugar modification: 2'-O-methoxyethylribose
  modified_base 15: mod_base = OTHER; note = backbone modification: 5'-phosphorothioate; note = sugar modification: 2'-O-methoxyethylribose; note = thymine
  modified_base 16: mod_base = OTHER; note = backbone modification: 5'-phosphorothioate; note = sugar modification: 2'-O-methoxyethylribose; note = thymine
  modified_base 17: mod_base = OTHER; note = backbone modification: 5'-phosphorothioate; note = sugar modification: 2'-O-methoxyethylribose
  modified_base 18: mod_base = OTHER; note = thymine; note = sugar modification: 2'-O-methoxyethylribose
ttagcttccagccattgt

SEQ ID NO: 498 - RNA, 18 nt, synthetic construct
  source 1..18: mol_type = other RNA; note = Antisense oligonucleotide
  modified_base 1: mod_base = m5c; mod_base = OTHER; note = backbone modification: 5'-phosphorothioate; note = sugar modification: 2'-O-methoxyethylribose
  modified_base 2: mod_base = OTHER; mod_base = m5c; note = backbone modification: 5'-phosphorothioate; note = sugar modification: 2'-O-methoxyethylribose
  modified_base 3: mod_base = OTHER; note = backbone modification: 5'-phosphorothioate; note = thymine; note = sugar modification: 2'-O-methoxyethylribose
  modified_base 4: mod_base = OTHER; note = sugar modification: 2'-O-methoxyethylribose; note = backbone modification: 5'-phosphorothioate; note = thymine
  modified_base 5: mod_base = OTHER; note = sugar modification: 2'-O-methoxyethylribose; note = backbone modification: 5'-phosphorothioate
  modified_base 6: mod_base = OTHER; note = backbone modification: 5'-phosphorothioate; note = sugar modification: 2'-O-methoxyethylribose
  modified_base 7: mod_base = OTHER; mod_base = m5c; note = sugar modification: 2'-O-methoxyethylribose; note = backbone modification: 5'-phosphorothioate
  modified_base 8: mod_base = OTHER; note = thymine; note = backbone modification: 5'-phosphorothioate; note = sugar modification: 2'-O-methoxyethylribose
  modified_base 9: mod_base = OTHER; note = sugar modification: 2'-O-methoxyethylribose; note = thymine; note = backbone modification: 5'-phosphorothioate
  modified_base 10: mod_base = OTHER; mod_base = m5c; note = backbone modification: 5'-phosphorothioate; note = sugar modification: 2'-O-methoxyethylribose
  modified_base 11: mod_base = OTHER; mod_base = m5c; note = backbone modification: 5'-phosphorothioate; note = sugar modification: 2'-O-methoxyethylribose
  modified_base 12: mod_base = OTHER; note = sugar modification: 2'-O-methoxyethylribose; note = backbone modification: 5'-phosphorothioate
  modified_base 13: mod_base = OTHER; note = sugar modification: 2'-O-methoxyethylribose; note = backbone modification: 5'-phosphorothioate
  modified_base 14: mod_base = OTHER; mod_base = m5c; note = sugar modification: 2'-O-methoxyethylribose; note = backbone modification: 5'-phosphorothioate
  modified_base 15: mod_base = m5c; mod_base = OTHER; note = sugar modification: 2'-O-methoxyethylribose; note = backbone modification: 5'-phosphorothioate
  modified_base 16: mod_base = OTHER; note = backbone modification: 5'-phosphorothioate; note = sugar modification: 2'-O-methoxyethylribose
  modified_base 17: mod_base = OTHER; note = backbone modification: 5'-phosphorothioate; note = sugar modification: 2'-O-methoxyethylribose; note = thymine
  modified_base 18: mod_base = OTHER; note = thymine; note = sugar modification: 2'-O-methoxyethylribose
ccttagcttccagccatt

SEQ ID NO: 499 - RNA, 18 nt, synthetic construct
  source 1..18: mol_type = other RNA; note = Antisense oligonucleotide
  modified_base 1: mod_base = OTHER; note = sugar modification: 2'-O-methoxyethylribose; note = backbone modification: 5'-phosphorothioate; note = thymine
  modified_base 2: mod_base = OTHER; mod_base = m5c; note = backbone modification: 5'-phosphorothioate; note = sugar modification: 2'-O-methoxyethylribose
  modified_base 3: mod_base = OTHER; mod_base = m5c; note = backbone modification: 5'-phosphorothioate; note = sugar modification: 2'-O-methoxyethylribose
  modified_base 4: mod_base = OTHER; note = thymine; note = sugar modification: 2'-O-methoxyethylribose; note = backbone modification: 5'-phosphorothioate
  modified_base 5: mod_base = OTHER; note = thymine; note = sugar modification: 2'-O-methoxyethylribose; note = backbone modification: 5'-phosphorothioate
  modified_base 6: mod_base = OTHER; note = sugar modification: 2'-O-methoxyethylribose; note = backbone modification: 5'-phosphorothioate
  modified_base 7: mod_base = OTHER; note = sugar modification: 2'-O-methoxyethylribose; note = backbone modification: 5'-phosphorothioate
  modified_base 8: mod_base = m5c; mod_base = OTHER; note = sugar modification: 2'-O-methoxyethylribose; note = backbone modification: 5'-phosphorothioate
  modified_base 9: mod_base = OTHER; note = sugar modification: 2'-O-methoxyethylribose; note = backbone modification: 5'-phosphorothioate; note = thymine
  modified_base 10: mod_base = OTHER; note = sugar modification: 2'-O-methoxyethylribose; note = backbone modification: 5'-phosphorothioate; note = thymine
  modified_base 11: mod_base = OTHER; mod_base = m5c; note = backbone modification: 5'-phosphorothioate; note = sugar modification: 2'-O-methoxyethylribose
  modified_base 12: mod_base = m5c; mod_base = OTHER; note = backbone modification: 5'-phosphorothioate; note = sugar modification: 2'-O-methoxyethylribose
  modified_base 13: mod_base = OTHER; note = backbone modification: 5'-phosphorothioate; note = sugar modification: 2'-O-methoxyethylribose
  modified_base 14: mod_base = OTHER; note = sugar modification: 2'-O-methoxyethylribose; note = backbone modification: 5'-phosphorothioate
  modified_base 15: mod_base = m5c; mod_base = OTHER; note = sugar modification: 2'-O-methoxyethylribose; note = backbone modification: 5'-phosphorothioate
  modified_base 16: mod_base = OTHER; mod_base = m5c; note = backbone modification: 5'-phosphorothioate; note = sugar modification: 2'-O-methoxyethylribose
  modified_base 17: mod_base = OTHER; note = sugar modification: 2'-O-methoxyethylribose; note = backbone modification: 5'-phosphorothioate
  modified_base 18: mod_base = OTHER; note = thymine; note = sugar modification: 2'-O-methoxyethylribose
tccttagcttccagccat

SEQ ID NO: 500 - RNA, 18 nt, synthetic construct
  source 1..18: mol_type = other RNA; note = Antisense oligonucleotide
  modified_base 1: mod_base = OTHER; note = sugar modification: 2'-O-methoxyethylribose; note = backbone modification: 5'-phosphorothioate; note = thymine
  modified_base 2: mod_base = OTHER; note = sugar modification: 2'-O-methoxyethylribose; note = thymine; note = backbone modification: 5'-phosphorothioate
  modified_base 3: mod_base = OTHER; mod_base = m5c; note = backbone modification: 5'-phosphorothioate; note = sugar modification: 2'-O-methoxyethylribose
  modified_base 4: mod_base = m5c; mod_base = OTHER; note = sugar modification: 2'-O-methoxyethylribose; note = backbone modification: 5'-phosphorothioate
  modified_base 5: mod_base = OTHER; note = thymine; note = sugar modification: 2'-O-methoxyethylribose; note = backbone modification: 5'-phosphorothioate
  modified_base 6: mod_base = OTHER; note = thymine; note = sugar modification: 2'-O-methoxyethylribose; note = backbone modification: 5'-phosphorothioate
  modified_base 7: mod_base = OTHER; note = sugar modification: 2'-O-methoxyethylribose; note = backbone modification: 5'-phosphorothioate
  modified_base 8: mod_base = OTHER; note = backbone modification: 5'-phosphorothioate; note = sugar modification: 2'-O-methoxyethylribose
  modified_base 9: mod_base = OTHER; mod_base = m5c; note = sugar modification: 2'-O-methoxyethylribose; note = backbone modification: 5'-phosphorothioate
  modified_base 10: mod_base = OTHER; note = backbone modification: 5'-phosphorothioate; note = thymine; note = sugar modification: 2'-O-methoxyethylribose
  modified_base 11: mod_base = OTHER; note = thymine; note = backbone modification: 5'-phosphorothioate; note = sugar modification: 2'-O-methoxyethylribose
  modified_base 12: mod_base = m5c; mod_base = OTHER; note = sugar modification: 2'-O-methoxyethylribose; note = backbone modification: 5'-phosphorothioate
  modified_base 13: mod_base = OTHER; mod_base = m5c; note = sugar modification: 2'-O-methoxyethylribose; note = backbone modification: 5'-phosphorothioate
  modified_base 14: mod_base = OTHER; note = sugar modification: 2'-O-methoxyethylribose; note = backbone modification: 5'-phosphorothioate
  modified_base 15: mod_base = OTHER; note = backbone modification: 5'-phosphorothioate; note = sugar modification: 2'-O-methoxyethylribose
  modified_base 16: mod_base = m5c; mod_base = OTHER; note = backbone modification: 5'-phosphorothioate; note = sugar modification: 2'-O-methoxyethylribose
  modified_base 17: mod_base = OTHER; mod_base = m5c; note = sugar modification: 2'-O-methoxyethylribose; note = backbone modification: 5'-phosphorothioate
  modified_base 18: mod_base = OTHER; note = sugar modification: 2'-O-methoxyethylribose
ttccttagcttccagcca

SEQ ID NO: 501 - RNA, 18 nt, synthetic construct
  source 1..18: mol_type = other RNA; note = Antisense oligonucleotide
  modified_base 1: mod_base = OTHER; mod_base = m5c; note = sugar modification: 2'-O-methoxyethylribose; note = backbone modification: 5'-phosphorothioate
  modified_base 2: mod_base = OTHER; note = backbone modification: 5'-phosphorothioate; note = thymine; note = sugar modification: 2'-O-methoxyethylribose
  modified_base 3: mod_base = OTHER; note = sugar modification: 2'-O-methoxyethylribose; note = backbone modification: 5'-phosphorothioate; note = thymine
  modified_base 4: mod_base = m5c; mod_base = OTHER; note = backbone modification: 5'-phosphorothioate; note = sugar modification: 2'-O-methoxyethylribose
  modified_base 5: mod_base = m5c; mod_base = OTHER; note = sugar modification: 2'-O-methoxyethylribose; note = backbone modification: 5'-phosphorothioate
  modified_base 6: mod_base = OTHER; note = sugar modification: 2'-O-methoxyethylribose; note = thymine; note = backbone modification: 5'-phosphorothioate
  modified_base 7: mod_base = OTHER; note = thymine; note = sugar modification: 2'-O-methoxyethylribose; note = backbone modification: 5'-phosphorothioate
  modified_base 8: mod_base = OTHER; note = backbone modification: 5'-phosphorothioate; note = sugar modification: 2'-O-methoxyethylribose
  modified_base 9: mod_base = OTHER; note = backbone modification: 5'-phosphorothioate; note = sugar modification: 2'-O-methoxyethylribose
  modified_base 10: mod_base = OTHER; mod_base = m5c; note = sugar modification: 2'-O-methoxyethylribose; note = backbone modification: 5'-phosphorothioate
  modified_base 11: mod_base = OTHER; note = sugar modification: 2'-O-methoxyethylribose; note = thymine; note = backbone modification: 5'-phosphorothioate
  modified_base 12: mod_base = OTHER; note = thymine; note = sugar modification: 2'-O-methoxyethylribose; note = backbone modification: 5'-phosphorothioate
  modified_base 13: mod_base = OTHER; mod_base = m5c; note = sugar modification: 2'-O-methoxyethylribose; note = backbone modification: 5'-phosphorothioate
  modified_base 14: mod_base = m5c; mod_base = OTHER; note = backbone modification: 5'-phosphorothioate; note = sugar modification: 2'-O-methoxyethylribose
  modified_base 15: mod_base = OTHER; note = sugar modification: 2'-O-methoxyethylribose; note = backbone modification: 5'-phosphorothioate
  modified_base 16: mod_base = OTHER; note = backbone modification: 5'-phosphorothioate; note = sugar modification: 2'-O-methoxyethylribose
  modified_base 17: mod_base = OTHER; mod_base = m5c; note = backbone modification: 5'-phosphorothioate; note = sugar modification: 2'-O-methoxyethylribose
  modified_base 18: mod_base = m5c; mod_base = OTHER; note = sugar modification: 2'-O-methoxyethylribose
cttccttagcttccagcc

SEQ ID NO: 502 - RNA, 18 nt, synthetic construct
  source 1..18: mol_type = other RNA; note = Antisense oligonucleotide
  modified_base 1: mod_base = OTHER; note = thymine; note = backbone modification: 5'-phosphorothioate; note = sugar modification: 2'-O-methoxyethylribose
  modified_base 2: mod_base = OTHER; note = sugar modification: 2'-O-methoxyethylribose; note = thymine; note = backbone modification: 5'-phosphorothioate
  modified_base 3: mod_base = m5c; mod_base = OTHER; note = sugar modification: 2'-O-methoxyethylribose; note = backbone modification: 5'-phosphorothioate
  modified_base 4: mod_base = OTHER; note = sugar modification: 2'-O-methoxyethylribose; note = backbone modification: 5'-phosphorothioate; note = thymine
  modified_base 5: mod_base = OTHER; note = sugar modification: 2'-O-methoxyethylribose; note = backbone modification: 5'-phosphorothioate; note = thymine
  modified_base 6: mod_base = OTHER; mod_base = m5c; note = sugar modification: 2'-O-methoxyethylribose; note = backbone modification: 5'-phosphorothioate
  modified_base 7: mod_base = OTHER; mod_base = m5c; note = sugar modification: 2'-O-methoxyethylribose; note = backbone modification: 5'-phosphorothioate
  modified_base 8: mod_base = OTHER; note = sugar modification: 2'-O-methoxyethylribose; note = backbone modification: 5'-phosphorothioate; note = thymine
  modified_base 9: mod_base = OTHER; note = sugar modification: 2'-O-methoxyethylribose; note = backbone modification: 5'-phosphorothioate; note = thymine
  modified_base 10: mod_base = OTHER; note = backbone modification: 5'-phosphorothioate; note = sugar modification: 2'-O-methoxyethylribose
  modified_base 11: mod_base = OTHER; note = backbone modification: 5'-phosphorothioate; note = sugar modification: 2'-O-methoxyethylribose
  modified_base 12: mod_base = m5c; mod_base = OTHER; note = backbone modification: 5'-phosphorothioate; note = sugar modification: 2'-O-methoxyethylribose
  modified_base 13: mod_base = OTHER; note = sugar modification: 2'-O-methoxyethylribose; note = thymine; note = backbone modification: 5'-phosphorothioate
  modified_base 14: mod_base = OTHER; note = backbone modification: 5'-phosphorothioate; note = sugar modification: 2'-O-methoxyethylribose; note = thymine
  modified_base 15: mod_base = m5c; mod_base = OTHER; note = backbone modification: 5'-phosphorothioate; note = sugar modification: 2'-O-methoxyethylribose
  modified_base 16: mod_base = m5c; mod_base = OTHER; note = backbone modification: 5'-phosphorothioate; note = sugar modification: 2'-O-methoxyethylribose
  modified_base 17: mod_base = OTHER; note = sugar modification: 2'-O-methoxyethylribose; note = backbone modification: 5'-phosphorothioate
  modified_base 18: mod_base = OTHER; note = sugar modification: 2'-O-methoxyethylribose
ttcttccttagcttccag

SEQ ID NO: 503 - RNA, 18 nt, synthetic construct
  source 1..18: mol_type = other RNA; note = Antisense oligonucleotide
  modified_base 1: mod_base = OTHER; mod_base = m5c; note = backbone modification: 5'-phosphorothioate; note = sugar modification: 2'-O-methoxyethylribose
  modified_base 2: mod_base = OTHER; note = backbone modification: 5'-phosphorothioate; note = thymine; note = sugar modification: 2'-O-methoxyethylribose
  modified_base 3: mod_base = OTHER; note = thymine; note = backbone modification: 5'-phosphorothioate; note = sugar modification: 2'-O-methoxyethylribose
  modified_base 4: mod_base = m5c; mod_base = OTHER; note = backbone modification: 5'-phosphorothioate; note = sugar modification: 2'-O-methoxyethylribose
  modified_base 5: mod_base = OTHER; note = sugar modification: 2'-O-methoxyethylribose; note = thymine; note = backbone modification: 5'-phosphorothioate
  modified_base 6: mod_base = OTHER; note = backbone modification: 5'-phosphorothioate; note = thymine; note = sugar modification: 2'-O-methoxyethylribose
  modified_base 7: mod_base = OTHER; mod_base = m5c; note = sugar modification: 2'-O-methoxyethylribose; note = backbone modification: 5'-phosphorothioate
  modified_base 8: mod_base = m5c; mod_base = OTHER; note = backbone modification: 5'-phosphorothioate; note = sugar modification: 2'-O-methoxyethylribose
  modified_base 9: mod_base = OTHER; note = thymine; note = backbone modification: 5'-phosphorothioate; note = sugar modification: 2'-O-methoxyethylribose
  modified_base 10: mod_base = OTHER; note = sugar modification: 2'-O-methoxyethylribose; note = backbone modification: 5'-phosphorothioate; note = thymine
  modified_base 11: mod_base = OTHER; note = sugar modification: 2'-O-methoxyethylribose; note = backbone modification: 5'-phosphorothioate
  modified_base 12: mod_base = OTHER; note = sugar modification: 2'-O-methoxyethylribose; note = backbone modification: 5'-phosphorothioate
  modified_base 13: mod_base = OTHER; mod_base = m5c; note = sugar modification: 2'-O-methoxyethylribose; note = backbone modification: 5'-phosphorothioate
  modified_base 14: mod_base = OTHER; note = sugar modification: 2'-O-methoxyethylribose; note = backbone modification: 5'-phosphorothioate; note = thymine
  modified_base 15: mod_base = OTHER; note = backbone modification: 5'-phosphorothioate; note = thymine; note = sugar modification: 2'-O-methoxyethylribose
  modified_base 16: mod_base = OTHER; mod_base = m5c; note = sugar modification: 2'-O-methoxyethylribose; note = backbone modification: 5'-phosphorothioate
  modified_base 17: mod_base = m5c; mod_base = OTHER; note = backbone modification: 5'-phosphorothioate; note = sugar modification: 2'-O-methoxyethylribose
  modified_base 18: mod_base = OTHER; note = sugar modification: 2'-O-methoxyethylribose
cttcttccttagcttcca

SEQ ID NO: 504 - RNA, 18 nt, synthetic construct
  source 1..18: mol_type = other RNA; note = Antisense oligonucleotide
  modified_base 1: mod_base = OTHER; note = sugar modification: 2'-O-methoxyethylribose; note = backbone modification: 5'-phosphorothioate
  modified_base 2: mod_base = m5c; mod_base = OTHER; note = sugar modification: 2'-O-methoxyethylribose; note = backbone modification: 5'-phosphorothioate
  modified_base 3: mod_base = OTHER; note = sugar modification: 2'-O-methoxyethylribose; note = backbone modification: 5'-phosphorothioate; note = thymine
  modified_base 4: mod_base = OTHER; note = thymine; note = sugar modification: 2'-O-methoxyethylribose; note = backbone modification: 5'-phosphorothioate
  modified_base 5: mod_base = OTHER; mod_base = m5c; note = sugar modification: 2'-O-methoxyethylribose; note = backbone modification: 5'-phosphorothioate
  modified_base 6: mod_base = OTHER; note = sugar modification: 2'-O-methoxyethylribose; note = thymine; note = backbone modification: 5'-phosphorothioate
  modified_base 7: mod_base = OTHER; note = sugar modification: 2'-O-methoxyethylribose; note = backbone modification: 5'-phosphorothioate; note = thymine
  modified_base 8: mod_base = m5c; mod_base = OTHER; note = sugar modification: 2'-O-methoxyethylribose; note = backbone modification: 5'-phosphorothioate
  modified_base 9: mod_base = OTHER; mod_base = m5c; note = sugar modification: 2'-O-methoxyethylribose; note = backbone modification: 5'-phosphorothioate
  modified_base 10: mod_base = OTHER; note = thymine; note = backbone modification: 5'-phosphorothioate; note = sugar modification: 2'-O-methoxyethylribose
  modified_base 11: mod_base = OTHER; note = backbone modification: 5'-phosphorothioate; note = sugar modification: 2'-O-methoxyethylribose; note = thymine
  modified_base 12: mod_base = OTHER; note = backbone modification: 5'-phosphorothioate; note = sugar modification: 2'-O-methoxyethylribose
  modified_base 13: mod_base = OTHER; note = backbone modification: 5'-phosphorothioate; note = sugar modification: 2'-O-methoxyethylribose
  modified_base 14: mod_base = OTHER; mod_base = m5c; note = sugar modification: 2'-O-methoxyethylribose; note = backbone modification: 5'-phosphorothioate
  modified_base 15: mod_base = OTHER; note = thymine; note = backbone modification: 5'-phosphorothioate; note = sugar modification: 2'-O-methoxyethylribose
  modified_base 16: mod_base = OTHER; note = sugar modification: 2'-O-methoxyethylribose; note = backbone modification: 5'-phosphorothioate; note = thymine
  modified_base 17: mod_base = OTHER; mod_base = m5c; note = sugar modification: 2'-O-methoxyethylribose; note = backbone modification: 5'-phosphorothioate
  modified_base 18: mod_base = m5c; mod_base = OTHER; note = sugar modification: 2'-O-methoxyethylribose
gcttcttccttagcttcc

SEQ ID NO: 505 - RNA, 18 nt, synthetic construct
  source 1..18: mol_type = other RNA; note = Antisense oligonucleotide
  modified_base 1: mod_base = OTHER; note = backbone modification: 5'-phosphorothioate; note = sugar modification: 2'-O-methoxyethylribose
  modified_base 2: mod_base = OTHER; note = backbone modification: 5'-phosphorothioate; note = sugar modification: 2'-O-methoxyethylribose
  modified_base 3: mod_base = m5c; mod_base = OTHER; note = sugar modification: 2'-O-methoxyethylribose; note = backbone modification: 5'-phosphorothioate
  modified_base 4: mod_base = OTHER; note = backbone modification: 5'-phosphorothioate; note = thymine; note = sugar modification: 2'-O-methoxyethylribose
  modified_base 5: mod_base = OTHER; note = sugar modification: 2'-O-methoxyethylribose; note = thymine; note = backbone modification: 5'-phosphorothioate
  modified_base 6: mod_base = m5c; mod_base = OTHER; note = sugar modification: 2'-O-methoxyethylribose; note = backbone modification: 5'-phosphorothioate
  modified_base 7: mod_base = OTHER; note = thymine; note = sugar modification: 2'-O-methoxyethylribose; note = backbone modification: 5'-phosphorothioate
  modified_base 8: mod_base = OTHER; note = thymine; note = backbone modification: 5'-phosphorothioate; note = sugar modification: 2'-O-methoxyethylribose
  modified_base 9: mod_base = m5c; mod_base = OTHER; note = backbone modification: 5'-phosphorothioate; note = sugar modification: 2'-O-methoxyethylribose
  modified_base 10: mod_base = OTHER; mod_base = m5c; note = sugar modification: 2'-O-methoxyethylribose; note = backbone modification: 5'-phosphorothioate
  modified_base 11: mod_base = OTHER; note = backbone modification: 5'-phosphorothioate; note = thymine; note = sugar modification: 2'-O-methoxyethylribose
  modified_base 12: mod_base = OTHER; note = backbone modification: 5'-phosphorothioate; note = thymine; note = sugar modification: 2'-O-methoxyethylribose
  modified_base 13: mod_base = OTHER; note = backbone modification: 5'-phosphorothioate; note = sugar modification: 2'-O-methoxyethylribose
  modified_base 14: mod_base = OTHER; note = sugar modification: 2'-O-methoxyethylribose; note = backbone modification: 5'-phosphorothioate
  modified_base 15: mod_base = m5c; mod_base = OTHER; note = sugar modification: 2'-O-methoxyethylribose; note = backbone modification: 5'-phosphorothioate
  modified_base 16: mod_base = OTHER; note = backbone modification: 5'-phosphorothioate; note = thymine; note = sugar modification: 2'-O-methoxyethylribose
  modified_base 17: mod_base = OTHER; note = thymine; note = sugar modification: 2'-O-methoxyethylribose; note = backbone modification: 5'-phosphorothioate
  modified_base 18: mod_base = m5c; mod_base = OTHER; note = sugar modification: 2'-O-methoxyethylribose
agcttcttccttagcttc

SEQ ID NO: 506 - RNA, 18 nt, synthetic construct
  source 1..18: mol_type = other RNA; note = Antisense oligonucleotide
  modified_base 1: mod_base = OTHER; note = sugar modification: 2'-O-methoxyethylribose; note = backbone modification: 5'-phosphorothioate
  modified_base 2: mod_base = OTHER; note = sugar modification: 2'-O-methoxyethylribose; note = backbone modification: 5'-phosphorothioate; note = thymine
  modified_base 3: mod_base = OTHER; note = backbone modification: 5'-phosphorothioate; note = sugar modification: 2'-O-methoxyethylribose; note = thymine
  modified_base 4: mod_base = OTHER; note = backbone modification: 5'-phosphorothioate; note = sugar modification: 2'-O-methoxyethylribose; note = thymine
  modified_base 5: mod_base = OTHER; mod_base = m5c; note = sugar modification: 2'-O-methoxyethylribose; note = backbone modification: 5'-phosphorothioate
  modified_base 6: mod_base = OTHER; note = backbone modification: 5'-phosphorothioate; note = sugar modification: 2'-O-methoxyethylribose; note = thymine
  modified_base 7: mod_base = OTHER; note = backbone modification: 5'-phosphorothioate; note = sugar modification: 2'-O-methoxyethylribose
  modified_base 8: mod_base = OTHER; note = sugar modification: 2'-O-methoxyethylribose; note = thymine; note = backbone modification: 5'-phosphorothioate
  modified_base 9: mod_base = OTHER; note = backbone modification: 5'-phosphorothioate; note = sugar modification: 2'-O-methoxyethylribose
  modified_base 10: mod_base = OTHER; note = backbone modification: 5'-phosphorothioate; note = sugar modification: 2'-O-methoxyethylribose
  modified_base 11: mod_base = OTHER; note = backbone modification: 5'-phosphorothioate; note = thymine; note = sugar modification: 2'-O-methoxyethylribose
  modified_base 12: mod_base = OTHER; note = thymine; note = sugar modification: 2'-O-methoxyethylribose; note = backbone modification: 5'-phosphorothioate
  modified_base 13: mod_base = OTHER; note = sugar modification: 2'-O-methoxyethylribose; note = backbone modification: 5'-phosphorothioate; note = thymine
  modified_base 14: mod_base = OTHER; note = thymine; note = backbone modification: 5'-phosphorothioate; note = sugar modification: 2'-O-methoxyethylribose
  modified_base 15: mod_base = OTHER; mod_base = m5c; note = sugar modification: 2'-O-methoxyethylribose; note = backbone modification: 5'-phosphorothioate
  modified_base 16: mod_base = OTHER; note = sugar modification: 2'-O-methoxyethylribose; note = backbone modification: 5'-phosphorothioate; note = thymine
  modified_base 17: mod_base = OTHER; note = sugar modification: 2'-O-methoxyethylribose; note = backbone modification: 5'-phosphorothioate; note = thymine
  modified_base 18: mod_base = OTHER; note = thymine; note = sugar modification: 2'-O-methoxyethylribose
gtttctgtgattttcttt

SEQ ID NO: 507 - RNA, 18 nt, synthetic construct
  source 1..18: mol_type = other RNA; note = Antisense oligonucleotide
  modified_base 1: mod_base = OTHER; note = sugar modification: 2'-O-methoxyethylribose; note = backbone modification: 5'-phosphorothioate
  modified_base 2: mod_base = OTHER; note = sugar modification: 2'-O-methoxyethylribose; note = backbone modification: 5'-phosphorothioate
  modified_base 3: mod_base = OTHER; note = thymine; note = backbone modification: 5'-phosphorothioate; note = sugar modification: 2'-O-methoxyethylribose
  modified_base 4: mod_base = OTHER; note = backbone modification: 5'-phosphorothioate; note = thymine; note = sugar modification: 2'-O-methoxyethylribose
  modified_base 5: mod_base = OTHER; note = backbone modification: 5'-phosphorothioate; note = thymine; note = sugar modification: 2'-O-methoxyethylribose
  modified_base 6: mod_base = m5c; mod_base = OTHER; note = backbone modification: 5'-phosphorothioate; note = sugar modification: 2'-O-methoxyethylribose
  modified_base 7: mod_base = OTHER; note = thymine; note = sugar modification: 2'-O-methoxyethylribose; note = backbone modification: 5'-phosphorothioate
  modified_base 8: mod_base = OTHER; note = backbone modification: 5'-phosphorothioate; note = sugar modification: 2'-O-methoxyethylribose
  modified_base 9: mod_base = OTHER; note = thymine; note = backbone modification: 5'-phosphorothioate; note = sugar modification: 2'-O-methoxyethylribose
  modified_base 10: mod_base = OTHER; note = sugar modification: 2'-O-methoxyethylribose; note = backbone modification: 5'-phosphorothioate
  modified_base 11: mod_base = OTHER; note = backbone modification: 5'-phosphorothioate; note = sugar modification: 2'-O-methoxyethylribose
  modified_base 12: mod_base = OTHER; note = sugar modification: 2'-O-methoxyethylribose; note = thymine; note = backbone modification: 5'-phosphorothioate
  modified_base 13: mod_base = OTHER; note = thymine; note = sugar modification: 2'-O-methoxyethylribose; note = backbone modification: 5'-phosphorothioate
  modified_base 14: mod_base = OTHER; note = backbone modification: 5'-phosphorothioate; note = thymine; note = sugar modification: 2'-O-methoxyethylribose
  modified_base 15: mod_base = OTHER; note = thymine; note = backbone modification: 5'-phosphorothioate; note = sugar modification: 2'-O-methoxyethylribose
  modified_base 16: mod_base = m5c; mod_base = OTHER; note = backbone modification: 5'-phosphorothioate; note = sugar modification: 2'-O-methoxyethylribose
  modified_base 17: mod_base = OTHER; note = thymine; note = sugar modification: 2'-O-methoxyethylribose; note = backbone modification: 5'-phosphorothioate
  modified_base 18: mod_base = OTHER; note = thymine; note = sugar modification: 2'-O-methoxyethylribose
ggtttctgtgattttctt

SEQ ID NO: 508 - RNA, 18 nt, synthetic construct
  source 1..18: mol_type = other RNA; note = Antisense oligonucleotide
  modified_base 1: mod_base = OTHER; note = backbone modification: 5'-phosphorothioate; note = sugar modification: 2'-O-methoxyethylribose; note = thymine
  modified_base 2: mod_base = OTHER; note = sugar modification: 2'-O-methoxyethylribose; note = backbone modification: 5'-phosphorothioate
  modified_base 3: mod_base = OTHER; note = backbone modification: 5'-phosphorothioate; note = sugar modification: 2'-O-methoxyethylribose
  modified_base 4: mod_base = OTHER; note = thymine; note = sugar modification: 2'-O-methoxyethylribose; note = backbone modification: 5'-phosphorothioate
  modified_base 5: mod_base = OTHER; note = thymine; note = backbone modification: 5'-phosphorothioate; note = sugar modification: 2'-O-methoxyethylribose
  modified_base 6: mod_base = OTHER; note = backbone modification: 5'-phosphorothioate; note = sugar modification: 2'-O-methoxyethylribose; note = thymine
  modified_base 7: mod_base = OTHER; mod_base = m5c; note = sugar modification: 2'-O-methoxyethylribose; note = backbone modification: 5'-phosphorothioate
  modified_base 8: mod_base = OTHER; note = thymine; note = sugar modification: 2'-O-methoxyethylribose; note = backbone modification: 5'-phosphorothioate
  modified_base 9: mod_base = OTHER; note = sugar modification: 2'-O-methoxyethylribose; note = backbone modification: 5'-phosphorothioate
  modified_base 10: mod_base = OTHER; note = thymine; note = backbone modification: 5'-phosphorothioate; note = sugar modification: 2'-O-methoxyethylribose
  modified_base 11: mod_base = OTHER; note = sugar modification: 2'-O-methoxyethylribose; note = backbone modification: 5'-phosphorothioate
  modified_base 12: mod_base = OTHER; note = sugar modification: 2'-O-methoxyethylribose; note = backbone modification: 5'-phosphorothioate
  modified_base 13: mod_base = OTHER; note = thymine; note = backbone modification: 5'-phosphorothioate; note = sugar modification: 2'-O-methoxyethylribose
  modified_base 14: mod_base = OTHER; note = sugar modification: 2'-O-methoxyethylribose; note = thymine; note = backbone modification: 5'-phosphorothioate
  modified_base 15: mod_base = OTHER; note = thymine; note = sugar modification: 2'-O-methoxyethylribose; note = backbone modification: 5'-phosphorothioate
  modified_base 16: mod_base = OTHER; note = thymine; note = sugar modification: 2'-O-methoxyethylribose; note = backbone modification: 5'-phosphorothioate
  modified_base 17: mod_base = m5c; mod_base = OTHER; note = backbone modification: 5'-phosphorothioate; note = sugar modification: 2'-O-methoxyethylribose
  modified_base 18: mod_base = OTHER; note = sugar modification: 2'-O-methoxyethylribose; note = thymine
tggtttctgtgattttct

SEQ ID NO: 509 - RNA, 18 nt, synthetic construct
  source 1..18: mol_type = other RNA; note = Antisense oligonucleotide
  modified_base 1: mod_base = OTHER; note = thymine; note = sugar modification: 2'-O-methoxyethylribose; note = backbone modification: 5'-phosphorothioate
  modified_base 2: mod_base = OTHER; note = sugar modification: 2'-O-methoxyethylribose; note = thymine; note = backbone modification: 5'-phosphorothioate
  modified_base 3: mod_base = OTHER; note = sugar modification: 2'-O-methoxyethylribose; note = backbone modification: 5'-phosphorothioate
  modified_base 4: mod_base = OTHER; note = backbone modification: 5'-phosphorothioate; note = sugar modification: 2'-O-methoxyethylribose
  modified_base 5: mod_base = OTHER; note = thymine; note = sugar modification: 2'-O-methoxyethylribose; note = backbone modification: 5'-phosphorothioate
  modified_base 6: mod_base = OTHER; note = backbone modification: 5'-phosphorothioate; note = sugar modification: 2'-O-methoxyethylribose; note = thymine
  modified_base 7: mod_base = OTHER; note = thymine; note = sugar modification: 2'-O-methoxyethylribose; note = backbone modification: 5'-phosphorothioate
  modified_base 8: mod_base = m5c; mod_base = OTHER; note = sugar modification: 2'-O-methoxyethylribose; note = backbone modification: 5'-phosphorothioate
  modified_base 9: mod_base = OTHER; note = sugar modification: 2'-O-methoxyethylribose; note = backbone modification: 5'-phosphorothioate; note = thymine
  modified_base 10: mod_base = OTHER; note = sugar modification: 2'-O-methoxyethylribose; note = backbone modification: 5'-phosphorothioate
  modified_base 11: mod_base = OTHER; note = backbone modification: 5'-phosphorothioate; note = sugar modification: 2'-O-methoxyethylribose; note = thymine
  modified_base 12: mod_base = OTHER; note = sugar modification: 2'-O-methoxyethylribose; note = backbone modification: 5'-phosphorothioate
  modified_base 13: mod_base = OTHER; note = sugar modification: 2'-O-methoxyethylribose; note = backbone modification: 5'-phosphorothioate
  modified_base 14: mod_base = OTHER; note = thymine; note = sugar modification: 2'-O-methoxyethylribose; note = backbone modification: 5'-phosphorothioate
  modified_base 15: mod_base = OTHER; note = sugar modification: 2'-O-methoxyethylribose; note = thymine; note = backbone modification: 5'-phosphorothioate
  modified_base 16: mod_base = OTHER; note = backbone modification: 5'-phosphorothioate; note = sugar modification: 2'-O-methoxyethylribose; note = thymine
  modified_base 17: mod_base = OTHER; note = backbone modification: 5'-phosphorothioate; note = thymine; note = sugar modification: 2'-O-methoxyethylribose
  modified_base 18: mod_base = m5c; mod_base = OTHER; note = sugar modification: 2'-O-methoxyethylribose
ttggtttctgtgattttc

SEQ ID NO: 510 - RNA, 18 nt, synthetic construct
  source 1..18: mol_type = other RNA; note = Antisense oligonucleotide
  modified_base 1: mod_base = m5c; mod_base = OTHER; note = backbone modification: 5'-phosphorothioate; note = sugar modification: 2'-O-methoxyethylribose
  modified_base 2: mod_base = m5c; mod_base = OTHER; note = sugar modification: 2'-O-methoxyethylribose; note = backbone modification: 5'-phosphorothioate
  modified_base 3: mod_base = OTHER; note = backbone modification: 5'-phosphorothioate; note = sugar modification: 2'-O-methoxyethylribose; note = thymine
  modified_base 4: mod_base = OTHER; note = backbone modification: 5'-phosphorothioate; note = sugar modification: 2'-O-methoxyethylribose; note = thymine
  modified_base 5: mod_base = OTHER; note = sugar modification: 2'-O-methoxyethylribose; note = backbone modification: 5'-phosphorothioate
  modified_base 6: mod_base = OTHER; note = sugar modification: 2'-O-methoxyethylribose; note = backbone modification: 5'-phosphorothioate
  modified_base 7: mod_base = OTHER; note = thymine; note = backbone modification: 5'-phosphorothioate; note = sugar modification: 2'-O-methoxyethylribose
  modified_base 8: mod_base = OTHER; note = thymine; note = sugar modification: 2'-O-methoxyethylribose; note = backbone modification: 5'-phosphorothioate
  modified_base 9: mod_base = OTHER; note = thymine; note = backbone modification: 5'-phosphorothioate; note = sugar modification: 2'-O-methoxyethylribose
  modified_base 10: mod_base = m5c; mod_base = OTHER; note = sugar modification: 2'-O-methoxyethylribose; note = backbone modification: 5'-phosphorothioate
  modified_base 11: mod_base = OTHER; note = thymine; note = sugar modification: 2'-O-methoxyethylribose; note = backbone modification: 5'-phosphorothioate
  modified_base 12: mod_base = OTHER; note = sugar modification: 2'-O-methoxyethylribose; note = backbone modification: 5'-phosphorothioate
  modified_base 13: mod_base = OTHER; note = backbone modification: 5'-phosphorothioate; note = thymine; note = sugar modification: 2'-O-methoxyethylribose
  modified_base 14: mod_base = OTHER; note = backbone modification: 5'-phosphorothioate; note = sugar modification: 2'-O-methoxyethylribose
  modified_base 15: mod_base = OTHER; note = backbone modification: 5'-phosphorothioate; note = sugar modification: 2'-O-methoxyethylribose
  modified_base 16: mod_base = OTHER; note = thymine; note = sugar modification: 2'-O-methoxyethylribose; note = backbone modification: 5'-phosphorothioate
  modified_base 17: mod_base = OTHER; note = backbone modification: 5'-phosphorothioate; note = thymine; note = sugar modification: 2'-O-methoxyethylribose
  modified_base 18: mod_base = OTHER; note = sugar modification: 2'-O-methoxyethylribose; note = thymine
ccttggtttctgtgattt

SEQ ID NO: 511 - RNA, 18 nt, synthetic construct
  source 1..18: mol_type = other RNA; note = Antisense oligonucleotide
  modified_base 1: mod_base = OTHER; note = sugar modification: 2'-O-methoxyethylribose; note = backbone modification: 5'-phosphorothioate
  modified_base 2: mod_base = m5c; mod_base = OTHER; note = sugar modification: 2'-O-methoxyethylribose; note = backbone modification: 5'-phosphorothioate
  modified_base 3: mod_base = OTHER; mod_base = m5c; note = backbone modification: 5'-phosphorothioate; note = sugar modification: 2'-O-methoxyethylribose
  modified_base 4: mod_base = OTHER; note = thymine; note = sugar modification: 2'-O-methoxyethylribose; note = backbone modification: 5'-phosphorothioate
  modified_base 5: mod_base = OTHER; note = backbone modification: 5'-phosphorothioate; note = thymine; note = sugar modification: 2'-O-methoxyethylribose
  modified_base 6: mod_base = OTHER; note = backbone modification: 5'-phosphorothioate; note = sugar modification: 2'-O-methoxyethylribose
  modified_base 7: mod_base = OTHER; note = backbone modification: 5'-phosphorothioate; note = sugar modification: 2'-O-methoxyethylribose
  modified_base 8: mod_base = OTHER; note = backbone modification: 5'-phosphorothioate; note = thymine; note = sugar modification: 2'-O-methoxyethylribose
  modified_base 9: mod_base = OTHER; note = thymine; note = sugar modification: 2'-O-methoxyethylribose; note = backbone modification: 5'-phosphorothioate
  modified_base 10: mod_base = OTHER; note = thymine; note = backbone modification: 5'-phosphorothioate; note = sugar modification: 2'-O-methoxyethylribose
  modified_base 11: mod_base = m5c; mod_base = OTHER; note = backbone modification: 5'-phosphorothioate; note = sugar modification: 2'-O-methoxyethylribose
  modified_base 12: mod_base = OTHER; note = thymine; note = backbone modification: 5'-phosphorothioate; note = sugar modification: 2'-O-methoxyethylribose
  modified_base 13: mod_base = OTHER; note = backbone modification: 5'-phosphorothioate; note = sugar modification: 2'-O-methoxyethylribose
  modified_base 14: mod_base = OTHER; note = sugar modification: 2'-O-methoxyethylribose; note = thymine; note = backbone modification: 5'-phosphorothioate
  modified_base 15: mod_base = OTHER; note = backbone modification: 5'-phosphorothioate; note = sugar modification: 2'-O-methoxyethylribose
  modified_base 16: mod_base = OTHER; note = sugar modification: 2'-O-methoxyethylribose; note = backbone modification: 5'-phosphorothioate
  modified_base 17: mod_base = OTHER; note = sugar modification: 2'-O-methoxyethylribose; note = thymine; note = backbone modification: 5'-phosphorothioate
  modified_base 18: mod_base = OTHER; note = thymine; note = sugar modification: 2'-O-methoxyethylribose
accttggtttctgtgatt

SEQ ID NO: 512 - RNA, 18 nt, synthetic construct
  source 1..18: mol_type = other RNA; note = Antisense oligonucleotide
  modified_base 1: mod_base = OTHER; note = backbone modification: 5'-phosphorothioate; note = sugar modification: 2'-O-methoxyethylribose
  modified_base 2: mod_base = OTHER; note = sugar modification: 2'-O-methoxyethylribose; note = backbone modification: 5'-phosphorothioate
  modified_base 3: mod_base = OTHER; mod_base = m5c; note = backbone modification: 5'-phosphorothioate; note = sugar modification: 2'-O-methoxyethylribose
  modified_base 4: mod_base = m5c; mod_base = OTHER; note = backbone modification: 5'-phosphorothioate; note = sugar modification: 2'-O-methoxyethylribose
  modified_base 5: mod_base = OTHER; note = sugar modification: 2'-O-methoxyethylribose; note = backbone modification: 5'-phosphorothioate; note = thymine
  modified_base 6: mod_base = OTHER; note = sugar modification: 2'-O-methoxyethylribose; note = thymine; note = backbone modification: 5'-phosphorothioate
  modified_base 7: mod_base = OTHER; note = backbone modification: 5'-phosphorothioate; note = sugar modification: 2'-O-methoxyethylribose
  modified_base 8: mod_base = OTHER; note = sugar modification: 2'-O-methoxyethylribose; note = backbone modification: 5'-phosphorothioate
  modified_base 9: mod_base = OTHER; note = backbone modification: 5'-phosphorothioate; note = sugar modification: 2'-O-methoxyethylribose; note = thymine
  modified_base 10: mod_base = OTHER; note = backbone modification: 5'-phosphorothioate; note = thymine; note = sugar modification: 2'-O-methoxyethylribose
  modified_base 11: mod_base = OTHER; note = sugar modification: 2'-O-methoxyethylribose; note = thymine; note = backbone modification: 5'-phosphorothioate
  modified_base 12: mod_base = OTHER; mod_base = m5c; note = sugar modification: 2'-O-methoxyethylribose; note = backbone modification: 5'-phosphorothioate
  modified_base 13: mod_base = OTHER; note = sugar modification: 2'-O-methoxyethylribose; note = backbone modification: 5'-phosphorothioate; note = thymine
  modified_base 14: mod_base = OTHER; note = sugar modification: 2'-O-methoxyethylribose; note = backbone modification: 5'-phosphorothioate
  modified_base 15: mod_base = OTHER; note = backbone modification: 5'-phosphorothioate; note = sugar modification: 2'-O-methoxyethylribose; note = thymine
  modified_base 16: mod_base = OTHER; note = backbone modification: 5'-phosphorothioate; note = sugar modification: 2'-O-methoxyethylribose
  modified_base 17: mod_base = OTHER; note = backbone modification: 5'-phosphorothioate; note = sugar modification: 2'-O-methoxyethylribose
  modified_base 18: mod_base = OTHER; note = sugar modification: 2'-O-methoxyethylribose; note = thymine
aaccttggtttctgtgat

SEQ ID NO: 513 - RNA, 18 nt, synthetic construct
  source 1..18: mol_type = other RNA; note = Antisense oligonucleotide
  modified_base 1: mod_base = OTHER; note = sugar modification: 2'-O-methoxyethylribose; note = thymine; note = backbone modification: 5'-phosphorothioate
  modified_base 2: mod_base = OTHER; note = backbone modification: 5'-phosphorothioate; note = sugar modification: 2'-O-methoxyethylribose
  modified_base 3: mod_base = OTHER; note = backbone modification: 5'-phosphorothioate; note = sugar modification: 2'-O-methoxyethylribose
  modified_base 4: mod_base = OTHER; mod_base = m5c; note = backbone modification: 5'-phosphorothioate; note = sugar modification: 2'-O-methoxyethylribose
  modified_base 5: mod_base = m5c; mod_base = OTHER; note = sugar modification: 2'-O-methoxyethylribose; note = backbone modification: 5'-phosphorothioate
  modified_base 6: mod_base = OTHER; note = sugar modification: 2'-O-methoxyethylribose; note = thymine; note = backbone modification: 5'-phosphorothioate
  modified_base 7: mod_base = OTHER; note = thymine; note = sugar modification: 2'-O-methoxyethylribose; note = backbone modification: 5'-phosphorothioate
  modified_base 8: mod_base = OTHER; note = backbone modification: 5'-phosphorothioate; note = sugar modification: 2'-O-methoxyethylribose
  modified_base 9: mod_base = OTHER; note = sugar modification: 2'-O-methoxyethylribose; note = backbone modification: 5'-phosphorothioate
  modified_base 10: mod_base = OTHER; note = backbone modification: 5'-phosphorothioate; note = thymine; note = sugar modification: 2'-O-methoxyethylribose
  modified_base 11: mod_base = OTHER; note = sugar modification: 2'-O-methoxyethylribose; note = backbone modification: 5'-phosphorothioate; note = thymine
  modified_base 12: mod_base = OTHER; note = sugar modification: 2'-O-methoxyethylribose; note = thymine; note = backbone modification: 5'-phosphorothioate
  modified_base 13: mod_base = m5c; mod_base = OTHER; note = sugar modification: 2'-O-methoxyethylribose; note = backbone modification: 5'-phosphorothioate
  modified_base 14: mod_base = OTHER; note = backbone modification: 5'-phosphorothioate; note = sugar modification: 2'-O-methoxyethylribose; note = thymine
  modified_base 15: mod_base = OTHER; note = backbone modification: 5'-phosphorothioate; note = sugar modification: 2'-O-methoxyethylribose
  modified_base 16: mod_base = OTHER; note = sugar modification: 2'-O-methoxyethylribose; note = thymine; note = backbone modification: 5'-phosphorothioate
  modified_base 17: mod_base = OTHER; note = backbone modification: 5'-phosphorothioate; note = sugar modification: 2'-O-methoxyethylribose
  modified_base 18: mod_base = OTHER; note = sugar modification: 2'-O-methoxyethylribose
taaccttggtttctgtga

SEQ ID NO: 514 - RNA, 18 nt, synthetic construct
  source 1..18: mol_type = other RNA; note = Antisense oligonucleotide
  modified_base 1: mod_base = OTHER; note = backbone modification: 5'-phosphorothioate; note = sugar modification: 2'-O-methoxyethylribose; note = thymine
  modified_base 2: mod_base = OTHER; note = backbone modification: 5'-phosphorothioate; note = thymine; note = sugar modification: 2'-O-methoxyethylribose
  modified_base 3: mod_base = OTHER; note = sugar modification: 2'-O-methoxyethylribose; note = backbone modification: 5'-phosphorothioate
  modified_base 4: mod_base = OTHER; note = sugar modification: 2'-O-methoxyethylribose; note = backbone modification: 5'-phosphorothioate
  modified_base 5: mod_base = OTHER; note = sugar modification: 2'-O-methoxyethylribose; note = backbone modification: 5'-phosphorothioate; note = thymine
  modified_base 6: mod_base = OTHER; note = backbone modification: 5'-phosphorothioate; note = sugar modification: 2'-O-methoxyethylribose
  modified_base 7: mod_base = OTHER; mod_base = m5c; note = sugar modification: 2'-O-methoxyethylribose; note = backbone modification: 5'-phosphorothioate
  modified_base 8: mod_base = OTHER; note = sugar modification: 2'-O-methoxyethylribose; note = thymine; note = backbone modification: 5'-phosphorothioate
  modified_base 9: mod_base = OTHER; note = sugar modification: 2'-O-methoxyethylribose; note = backbone modification: 5'-phosphorothioate
  modified_base 10: mod_base = OTHER; note = sugar modification: 2'-O-methoxyethylribose; note = backbone modification: 5'-phosphorothioate
  modified_base 11: mod_base = OTHER; mod_base = m5c; note = sugar modification: 2'-O-methoxyethylribose; note = backbone modification: 5'-phosphorothioate
  modified_base 12: mod_base = OTHER; mod_base = m5c; note = sugar modification: 2'-O-methoxyethylribose; note = backbone modification: 5'-phosphorothioate
  modified_base 13: mod_base = OTHER; note = thymine; note = sugar modification: 2'-O-methoxyethylribose; note = backbone modification: 5'-phosphorothioate
  modified_base 14: mod_base = OTHER; note = thymine; note = sugar modification: 2'-O-methoxyethylribose; note = backbone modification: 5'-phosphorothioate
  modified_base 15: mod_base = OTHER; note = backbone modification: 5'-phosphorothioate; note = sugar modification: 2'-O-methoxyethylribose
  modified_base 16: mod_base = OTHER; note = sugar modification: 2'-O-methoxyethylribose; note = backbone modification: 5'-phosphorothioate
  modified_base 17: mod_base = OTHER; note = backbone modification: 5'-phosphorothioate; note = thymine; note = sugar modification: 2'-O-methoxyethylribose
  modified_base 18: mod_base = OTHER; note = thymine; note = sugar modification: 2'-O-methoxyethylribose
ttgatactaaccttggtt

SEQ ID NO: 515 - RNA, 18 nt, synthetic construct
  source 1..18: mol_type = other RNA; note = Antisense oligonucleotide
  modified_base 1: mod_base = OTHER; note = sugar modification: 2'-O-methoxyethylribose; note = thymine; note = backbone modification: 5'-phosphorothioate
  modified_base 2: mod_base = OTHER; note = thymine; note = sugar modification: 2'-O-methoxyethylribose; note = backbone modification: 5'-phosphorothioate
  modified_base 3: mod_base = OTHER; note = sugar modification: 2'-O-methoxyethylribose; note = backbone modification: 5'-phosphorothioate; note = thymine
  modified_base 4: mod_base = OTHER; note = sugar modification: 2'-O-methoxyethylribose; note = backbone modification: 5'-phosphorothioate
  modified_base 5: mod_base = OTHER; note = backbone modification: 5'-phosphorothioate; note = sugar modification: 2'-O-methoxyethylribose
  modified_base 6: mod_base = OTHER; note = thymine; note = sugar modification: 2'-O-methoxyethylribose; note = backbone modification: 5'-phosphorothioate
  modified_base 7: mod_base = OTHER; note = sugar modification: 2'-O-methoxyethylribose; note = backbone modification: 5'-phosphorothioate
  modified_base 8: mod_base = m5c; mod_base = OTHER; note = sugar modification: 2'-O-methoxyethylribose; note = backbone modification: 5'-phosphorothioate
  modified_base 9: mod_base = OTHER; note = thymine; note = sugar modification: 2'-O-methoxyethylribose; note = backbone modification: 5'-phosphorothioate
  modified_base 10: mod_base = OTHER; note = sugar modification: 2'-O-methoxyethylribose; note = backbone modification: 5'-phosphorothioate
  modified_base 11: mod_base = OTHER; note = backbone modification: 5'-phosphorothioate; note = sugar modification: 2'-O-methoxyethylribose
  modified_base 12: mod_base = m5c; mod_base = OTHER; note = sugar modification: 2'-O-methoxyethylribose; note = backbone modification: 5'-phosphorothioate
  modified_base 13: mod_base = OTHER; mod_base = m5c; note = sugar modification: 2'-O-methoxyethylribose; note = backbone modification: 5'-phosphorothioate
  modified_base 14: mod_base = OTHER; note = backbone modification: 5'-phosphorothioate; note = thymine; note = sugar modification: 2'-O-methoxyethylribose
  modified_base 15: mod_base = OTHER; note = sugar modification: 2'-O-methoxyethylribose; note = backbone modification: 5'-phosphorothioate; note = thymine
  modified_base 16: mod_base = OTHER; note = backbone modification: 5'-phosphorothioate; note = sugar modification: 2'-O-methoxyethylribose
  modified_base 17: mod_base = OTHER; note = sugar modification: 2'-O-methoxyethylribose; note = backbone modification: 5'-phosphorothioate
  modified_base 18: mod_base = OTHER; note = thymine; note = sugar modification: 2'-O-methoxyethylribose
tttgatactaaccttggt

SEQ ID NO: 516 - RNA, 18 nt, synthetic construct
  source 1..18: mol_type = other RNA; note = Antisense oligonucleotide
  modified_base 1: mod_base = m5c; mod_base = OTHER; note = backbone modification: 5'-phosphorothioate; note = sugar modification: 2'-O-methoxyethylribose
  modified_base 2: mod_base = OTHER; note = thymine; note = sugar modification: 2'-O-methoxyethylribose; note = backbone modification: 5'-phosphorothioate
  modified_base 3: mod_base = OTHER; note = backbone modification: 5'-phosphorothioate; note = thymine; note = sugar modification: 2'-O-methoxyethylribose
  modified_base 4: mod_base = OTHER; note = thymine; note = backbone modification: 5'-phosphorothioate; note = sugar modification: 2'-O-methoxyethylribose
  modified_base 5: mod_base = OTHER; note = backbone modification: 5'-phosphorothioate; note = sugar modification: 2'-O-methoxyethylribose
  modified_base 6: mod_base = OTHER; note = backbone modification: 5'-phosphorothioate; note = sugar modification: 2'-O-methoxyethylribose
  modified_base 7: mod_base = OTHER; note = sugar modification: 2'-O-methoxyethylribose; note = thymine; note = backbone modification: 5'-phosphorothioate
  modified_base 8: mod_base = OTHER; note = sugar modification: 2'-O-methoxyethylribose; note = backbone modification: 5'-phosphorothioate
  modified_base 9: mod_base = m5c; mod_base = OTHER; note = backbone modification: 5'-phosphorothioate; note = sugar modification: 2'-O-methoxyethylribose
  modified_base 10: mod_base = OTHER; note = sugar modification: 2'-O-methoxyethylribose; note = thymine; note = backbone modification: 5'-phosphorothioate
  modified_base 11: mod_base = OTHER; note = backbone modification: 5'-phosphorothioate; note = sugar modification: 2'-O-methoxyethylribose
  modified_base 12: mod_base = OTHER; note = backbone modification: 5'-phosphorothioate; note = sugar modification: 2'-O-methoxyethylribose
  modified_base 13: mod_base = m5c; mod_base = OTHER; note = sugar modification: 2'-O-methoxyethylribose; note = backbone modification: 5'-phosphorothioate
  modified_base 14: mod_base = OTHER; mod_base = m5c; note = sugar modification: 2'-O-methoxyethylribose; note = backbone modification: 5'-phosphorothioate
  modified_base 15: mod_base = OTHER; note = thymine; note = backbone modification: 5'-phosphorothioate; note = sugar modification: 2'-O-methoxyethylribose
  modified_base 16: mod_base = OTHER; note = thymine; note = backbone modification: 5'-phosphorothioate; note = sugar modification: 2'-O-methoxyethylribose
  modified_base 17: mod_base = OTHER; note = sugar modification: 2'-O-methoxyethylribose; note = backbone modification: 5'-phosphorothioate
  modified_base 18: mod_base = OTHER; note = sugar modification: 2'-O-methoxyethylribose
ctttgatactaaccttgg

SEQ ID NO: 517 - RNA, 18 nt, synthetic construct
  source 1..18: mol_type = other RNA; note = Antisense oligonucleotide
  modified_base 1: mod_base = OTHER; note = thymine; note = sugar modification: 2'-O-methoxyethylribose; note = backbone modification: 5'-phosphorothioate
  modified_base 2: mod_base = OTHER; mod_base = m5c; note = backbone modification: 5'-phosphorothioate; note = sugar modification: 2'-O-methoxyethylribose
  modified_base 3: mod_base = OTHER; note = sugar modification: 2'-O-methoxyethylribose; note = thymine; note = backbone modification: 5'-phosphorothioate
  modified_base 4: mod_base = OTHER; note = sugar modification: 2'-O-methoxyethylribose; note = thymine; note = backbone modification: 5'-phosphorothioate
  modified_base 5: mod_base = OTHER; note = thymine; note = sugar modification: 2'-O-methoxyethylribose; note = backbone modification: 5'-phosphorothioate
  modified_base 6: mod_base = OTHER; note = backbone modification: 5'-phosphorothioate; note = sugar modification: 2'-O-methoxyethylribose
  modified_base 7: mod_base = OTHER; note = sugar modification: 2'-O-methoxyethylribose; note = backbone modification: 5'-phosphorothioate
  modified_base 8: mod_base = OTHER; note = sugar modification: 2'-O-methoxyethylribose; note = thymine; note = backbone modification: 5'-phosphorothioate
  modified_base 9: mod_base = OTHER; note = backbone modification: 5'-phosphorothioate; note = sugar modification: 2'-O-methoxyethylribose
  modified_base 10: mod_base = OTHER; mod_base = m5c; note = backbone modification: 5'-phosphorothioate; note = sugar modification: 2'-O-methoxyethylribose
  modified_base 11: mod_base = OTHER; note = sugar modification: 2'-O-methoxyethylribose; note = backbone modification: 5'-phosphorothioate; note = thymine
  modified_base 12: mod_base = OTHER; note = sugar modification: 2'-O-methoxyethylribose; note = backbone modification: 5'-phosphorothioate
  modified_base 13: mod_base = OTHER; note = sugar modification: 2'-O-methoxyethylribose; note = backbone modification: 5'-phosphorothioate
  modified_base 14: mod_base = m5c; mod_base = OTHER; note = sugar modification: 2'-O-methoxyethylribose; note = backbone modification: 5'-phosphorothioate
  modified_base 15: mod_base = OTHER; mod_base = m5c; note = sugar modification: 2'-O-methoxyethylribose; note = backbone modification: 5'-phosphorothioate
  modified_base 16: mod_base = OTHER; note = thymine; note = backbone modification: 5'-phosphorothioate; note = sugar modification: 2'-O-methoxyethylribose
  modified_base 17: mod_base = OTHER; note = backbone modification: 5'-phosphorothioate; note = thymine; note = sugar modification: 2'-O-methoxyethylribose
  modified_base 18: mod_base = OTHER; note = sugar modification: 2'-O-methoxyethylribose
tctttgatactaaccttg

SEQ ID NO: 518 - RNA, 18 nt, synthetic construct
  source 1..18: mol_type = other RNA; note = Antisense oligonucleotide
  modified_base 1: mod_base = OTHER; note = thymine; note = backbone modification: 5'-phosphorothioate; note = sugar modification: 2'-O-methoxyethylribose
  modified_base 2: mod_base = OTHER; note = backbone modification: 5'-phosphorothioate; note = sugar modification: 2'-O-methoxyethylribose
  modified_base 3: mod_base = OTHER; note = sugar modification: 2'-O-methoxyethylribose; note = thymine; note = backbone modification: 5'-phosphorothioate
  modified_base 4: mod_base = OTHER; mod_base = m5c; note = backbone modification: 5'-phosphorothioate; note = sugar modification: 2'-O-methoxyethylribose
  modified_base 5: mod_base = OTHER; note = sugar modification: 2'-O-methoxyethylribose; note = thymine; note = backbone modification: 5'-phosphorothioate
  modified_base 6: mod_base = OTHER; note = thymine; note = sugar modification: 2'-O-methoxyethylribose; note = backbone modification: 5'-phosphorothioate
  modified_base 7: mod_base = OTHER; note = backbone modification: 5'-phosphorothioate; note = thymine; note = sugar modification: 2'-O-methoxyethylribose
  modified_base 8: mod_base = OTHER; note = sugar modification: 2'-O-methoxyethylribose; note = backbone modification: 5'-phosphorothioate
  modified_base 9: mod_base = OTHER; note = backbone modification: 5'-phosphorothioate; note = sugar modification: 2'-O-methoxyethylribose
  modified_base 10: mod_base = OTHER; note = sugar modification: 2'-O-methoxyethylribose; note = backbone modification: 5'-phosphorothioate; note = thymine
  modified_base 11: mod_base = OTHER; note = sugar modification: 2'-O-methoxyethylribose; note = backbone modification: 5'-phosphorothioate
  modified_base 12: mod_base = OTHER; mod_base = m5c; note = sugar modification: 2'-O-methoxyethylribose; note = backbone modification: 5'-phosphorothioate
  modified_base 13: mod_base = OTHER; note = thymine; note = sugar modification: 2'-O-methoxyethylribose; note = backbone modification: 5'-phosphorothioate
  modified_base 14: mod_base = OTHER; note = backbone modification: 5'-phosphorothioate; note = sugar modification: 2'-O-methoxyethylribose
  modified_base 15: mod_base = OTHER; note = backbone modification: 5'-phosphorothioate; note = sugar modification: 2'-O-methoxyethylribose
  modified_base 16: mod_base = OTHER; mod_base = m5c; note = backbone modification: 5'-phosphorothioate; note = sugar modification: 2'-O-methoxyethylribose
  modified_base 17: mod_base = OTHER; mod_base = m5c; note = sugar modification: 2'-O-methoxyethylribose; note = backbone modification: 5'-phosphorothioate
  modified_base 18: mod_base = OTHER; note = thymine; note = sugar modification: 2'-O-methoxyethylribose
tatctttgatactaacct

SEQ ID NO: 519 - RNA, 18 nt, synthetic construct
  source 1..18: mol_type = other RNA; note = Antisense oligonucleotide
  modified_base 1: mod_base = OTHER; note = backbone modification: 5'-phosphorothioate; note = sugar modification: 2'-O-methoxyethylribose
  modified_base 2: mod_base = OTHER; note = thymine; note = sugar modification: 2'-O-methoxyethylribose; note = backbone modification: 5'-phosphorothioate
  modified_base 3: mod_base = OTHER; note = backbone modification: 5'-phosphorothioate; note = sugar modification: 2'-O-methoxyethylribose
  modified_base 4: mod_base = OTHER; note = thymine; note = sugar modification: 2'-O-methoxyethylribose; note = backbone modification: 5'-phosphorothioate
  modified_base 5: mod_base = m5c; mod_base = OTHER; note = sugar modification: 2'-O-methoxyethylribose; note = backbone modification: 5'-phosphorothioate
  modified_base 6: mod_base = OTHER; note = sugar modification: 2'-O-methoxyethylribose; note = backbone modification: 5'-phosphorothioate; note = thymine
  modified_base 7: mod_base = OTHER; note = backbone modification: 5'-phosphorothioate; note = sugar modification: 2'-O-methoxyethylribose; note = thymine
  modified_base 8: mod_base = OTHER; note = backbone modification: 5'-phosphorothioate; note = sugar modification: 2'-O-methoxyethylribose; note = thymine
  modified_base 9: mod_base = OTHER; note = sugar modification: 2'-O-methoxyethylribose; note = backbone modification: 5'-phosphorothioate
  modified_base 10: mod_base = OTHER; note = backbone modification: 5'-phosphorothioate; note = sugar modification: 2'-O-methoxyethylribose
  modified_base 11: mod_base = OTHER; note = backbone modification: 5'-phosphorothioate; note = thymine; note = sugar modification: 2'-O-methoxyethylribose
  modified_base 12: mod_base = OTHER; note = backbone modification: 5'-phosphorothioate; note = sugar modification: 2'-O-methoxyethylribose
  modified_base 13: mod_base = OTHER; mod_base = m5c; note = backbone modification: 5'-phosphorothioate; note = sugar modification: 2'-O-methoxyethylribose
  modified_base 14: mod_base = OTHER; note = sugar modification: 2'-O-methoxyethylribose; note = thymine; note = backbone modification: 5'-phosphorothioate
  modified_base 15: mod_base = OTHER; note = sugar modification: 2'-O-methoxyethylribose; note = backbone modification: 5'-phosphorothioate
  modified_base 16: mod_base = OTHER; note = backbone modification: 5'-phosphorothioate; note = sugar modification: 2'-O-methoxyethylribose
  modified_base 17: mod_base = m5c; mod_base = OTHER; note = backbone modification: 5'-phosphorothioate; note = sugar modification: 2'-O-methoxyethylribose
  modified_base 18: mod_base = OTHER; mod_base = m5c; note = sugar modification: 2'-O-methoxyethylribose
gtatctttgatactaacc

SEQ ID NO: 520 - RNA, 18 nt, synthetic construct
  source 1..18: mol_type = other RNA; note = Antisense oligonucleotide
  modified_base 1: mod_base = OTHER; note = backbone modification: 5'-phosphorothioate; note = sugar modification: 2'-O-methoxyethylribose
  modified_base 2: mod_base = OTHER; note = sugar modification: 2'-O-methoxyethylribose; note = backbone modification: 5'-phosphorothioate
  modified_base 3: mod_base = OTHER; note = thymine; note = sugar modification: 2'-O-methoxyethylribose; note = backbone modification: 5'-phosphorothioate
  modified_base 4: mod_base = OTHER; note = sugar modification: 2'-O-methoxyethylribose; note = backbone modification: 5'-phosphorothioate
  modified_base 5: mod_base = OTHER; note = backbone modification: 5'-phosphorothioate; note = thymine; note = sugar modification: 2'-O-methoxyethylribose
  modified_base 6: mod_base = m5c; mod_base = OTHER; note = backbone modification: 5'-phosphorothioate; note = sugar modification: 2'-O-methoxyethylribose
  modified_base 7: mod_base = OTHER; note = backbone modification: 5'-phosphorothioate; note = sugar modification: 2'-O-methoxyethylribose; note = thymine
  modified_base 8: mod_base = OTHER; note = sugar modification: 2'-O-methoxyethylribose; note = backbone modification: 5'-phosphorothioate; note = thymine
  modified_base 9: mod_base = OTHER; note = backbone modification: 5'-phosphorothioate; note = sugar modification: 2'-O-methoxyethylribose; note = thymine
  modified_base 10: mod_base = OTHER; note = backbone modification: 5'-phosphorothioate; note = sugar modification: 2'-O-methoxyethylribose
  modified_base 11: mod_base = OTHER; note = sugar modification: 2'-O-methoxyethylribose; note = backbone modification: 5'-phosphorothioate
  modified_base 12: mod_base = OTHER; note = backbone modification: 5'-phosphorothioate; note = sugar modification: 2'-O-methoxyethylribose; note = thymine
  modified_base 13: mod_base = OTHER; note = sugar modification: 2'-O-methoxyethylribose; note = backbone modification: 5'-phosphorothioate
  modified_base 14: mod_base = OTHER; mod_base = m5c; note = backbone modification: 5'-phosphorothioate; note = sugar modification: 2'-O-methoxyethylribose
  modified_base 15: mod_base = OTHER; note = thymine; note = backbone modification: 5'-phosphorothioate; note = sugar modification: 2'-O-methoxyethylribose
  modified_base 16: mod_base = OTHER; note = backbone modification: 5'-phosphorothioate; note = sugar modification: 2'-O-methoxyethylribose
  modified_base 17: mod_base = OTHER; note = backbone modification: 5'-phosphorothioate; note = sugar modification: 2'-O-methoxyethylribose
  modified_base 18: mod_base = m5c; mod_base = OTHER; note = sugar modification: 2'-O-methoxyethylribose
ggtatctttgatactaac

SEQ ID NO: 521 - RNA, 18 nt, synthetic construct
  source 1..18: mol_type = other RNA; note = Antisense oligonucleotide
  modified_base 1: mod_base = OTHER; note = sugar modification: 2'-O-methoxyethylribose; note = backbone modification: 5'-phosphorothioate
  modified_base 2: mod_base = OTHER; note = sugar modification: 2'-O-methoxyethylribose; note = backbone modification: 5'-phosphorothioate
  modified_base 3: mod_base = OTHER; note = backbone modification: 5'-phosphorothioate; note = sugar modification: 2'-O-methoxyethylribose
  modified_base 4: mod_base = OTHER; note = thymine; note = backbone modification: 5'-phosphorothioate; note = sugar modification: 2'-O-methoxyethylribose
  modified_base 5: mod_base = OTHER; note = backbone modification: 5'-phosphorothioate; note = sugar modification: 2'-O-methoxyethylribose
  modified_base 6: mod_base = OTHER; note = backbone modification: 5'-phosphorothioate; note = thymine; note = sugar modification: 2'-O-methoxyethylribose
  modified_base 7: mod_base = OTHER; mod_base = m5c; note = backbone modification: 5'-phosphorothioate; note = sugar modification: 2'-O-methoxyethylribose
  modified_base 8: mod_base = OTHER; note = backbone modification: 5'-phosphorothioate; note = thymine; note = sugar modification: 2'-O-methoxyethylribose
  modified_base 9: mod_base = OTHER; note = backbone modification: 5'-phosphorothioate; note = thymine; note = sugar modification: 2'-O-methoxyethylribose
  modified_base 10: mod_base = OTHER; note = backbone modification: 5'-phosphorothioate; note = sugar modification: 2'-O-methoxyethylribose; note = thymine
  modified_base 11: mod_base = OTHER; note = backbone modification: 5'-phosphorothioate; note = sugar modification: 2'-O-methoxyethylribose
  modified_base 12: mod_base = OTHER; note = sugar modification: 2'-O-methoxyethylribose; note = backbone modification: 5'-phosphorothioate
  modified_base 13: mod_base = OTHER; note = backbone modification: 5'-phosphorothioate; note = thymine; note = sugar modification: 2'-O-methoxyethylribose
  modified_base 14: mod_base = OTHER; note = sugar modification: 2'-O-methoxyethylribose; note = backbone modification: 5'-phosphorothioate
  modified_base 15: mod_base = m5c; mod_base = OTHER; note = backbone modification: 5'-phosphorothioate; note = sugar modification: 2'-O-methoxyethylribose
  modified_base 16: mod_base = OTHER; note = backbone modification: 5'-phosphorothioate; note = sugar modification: 2'-O-methoxyethylribose; note = thymine
  modified_base 17: mod_base = OTHER; note = sugar modification: 2'-O-methoxyethylribose; note = backbone modification: 5'-phosphorothioate
  modified_base 18: mod_base = OTHER; note = sugar modification: 2'-O-methoxyethylribose
aggtatctttgatactaa

SEQ ID NO: 522 - RNA, 18 nt, synthetic construct
  source 1..18: mol_type = other RNA; note = Antisense oligonucleotide
  modified_base 1: mod_base = OTHER; note = sugar modification: 2-fluororibose; note = thymine; note = backbone modification: 5'-phosphorothioate
  modified_base 2: mod_base = OTHER; note = sugar modification: 2'-O-methoxyethylribose; note = backbone modification: 5'-phosphorothioate
  modified_base 3: mod_base = OTHER; note = sugar modification: 2'-O-methoxyethylribose; note = backbone modification: 5'-phosphorothioate; note = thymine
  modified_base 4: mod_base = OTHER; note = sugar modification: 2'-O-methoxyethylribose; note = thymine; note = backbone modification: 5'-phosphorothioate
  modified_base 5: mod_base = m5c; mod_base = OTHER; note = sugar modification: 2'-O-methoxyethylribose; note = backbone modification: 5'-phosphorothioate
  modified_base 6: mod_base = OTHER; note = backbone modification: 5'-phosphorothioate; note = thymine; note = sugar modification: 2'-O-methoxyethylribose
  modified_base 7: mod_base = OTHER; note = sugar modification: 2'-O-methoxyethylribose; note = thymine; note = backbone modification: 5'-phosphorothioate
  modified_base 8: mod_base = OTHER; note = sugar modification: 2'-O-methoxyethylribose; note = backbone modification: 5'-phosphorothioate
  modified_base 9: mod_base = OTHER; note = backbone modification: 5'-phosphorothioate; note = thymine; note = sugar modification: 2'-O-methoxyethylribose
  modified_base 10: mod_base = OTHER; note = sugar modification: 2'-O-methoxyethylribose; note = backbone modification: 5'-phosphorothioate
  modified_base 11: mod_base = OTHER; mod_base = m5c; note = sugar modification: 2'-O-methoxyethylribose; note = backbone modification: 5'-phosphorothioate
  modified_base 12: mod_base = OTHER; note = backbone modification: 5'-phosphorothioate; note = thymine; note = sugar modification: 2'-O-methoxyethylribose
  modified_base 13: mod_base = OTHER; note = thymine; note = sugar modification: 2'-O-methoxyethylribose; note = backbone modification: 5'-phosphorothioate
  modified_base 14: mod_base = m5c; mod_base = OTHER; note = backbone modification: 5'-phosphorothioate; note = sugar modification: 2'-O-methoxyethylribose
  modified_base 15: mod_base = OTHER; note = sugar modification: 2'-O-methoxyethylribose; note = backbone modification: 5'-phosphorothioate
  modified_base 16: mod_base = OTHER; note = backbone modification: 5'-phosphorothioate; note = sugar modification: 2'-O-methoxyethylribose; note = thymine
  modified_base 17: mod_base = m5c; mod_base = OTHER; note = backbone modification: 5'-phosphorothioate; note = sugar modification: 2'-O-methoxyethylribose
  modified_base 18: mod_base = m5c; mod_base = OTHER; note = sugar modification: 2-fluororibose
tgttcttgtacttcatcc

SEQ ID NO: 523 - RNA, 18 nt, synthetic construct
  source 1..18: mol_type = other RNA; note = Antisense oligonucleotide
  modified_base 1: mod_base = OTHER; note = thymine; note = backbone modification: 5'-phosphorothioate; note = sugar modification: 2-fluororibose
  modified_base 2: mod_base = OTHER; note = backbone modification: 5'-phosphorothioate; note = sugar modification: 2-fluororibose
  modified_base 3: mod_base = OTHER; note = thymine; note = sugar modification: 2'-O-methoxyethylribose; note = backbone modification: 5'-phosphorothioate
  modified_base 4: mod_base = OTHER; note = thymine; note = sugar modification: 2'-O-methoxyethylribose; note = backbone modification: 5'-phosphorothioate
  modified_base 5: mod_base = OTHER; mod_base = m5c; note = backbone modification: 5'-phosphorothioate; note = sugar modification: 2'-O-methoxyethylribose
  modified_base 6: mod_base = OTHER; note = thymine; note = sugar modification: 2'-O-methoxyethylribose; note = backbone modification: 5'-phosphorothioate
  modified_base 7: mod_base = OTHER; note = thymine; note = sugar modification: 2'-O-methoxyethylribose; note = backbone modification: 5'-phosphorothioate
  modified_base 8: mod_base = OTHER; note = sugar modification: 2'-O-methoxyethylribose; note = backbone modification: 5'-phosphorothioate
  modified_base 9: mod_base = OTHER; note = sugar modification: 2'-O-methoxyethylribose; note = thymine; note = backbone modification: 5'-phosphorothioate
  modified_base 10: mod_base = OTHER; note = sugar modification: 2'-O-methoxyethylribose; note = backbone modification: 5'-phosphorothioate
  modified_base 11: mod_base = OTHER; mod_base = m5c; note = sugar modification: 2'-O-methoxyethylribose; note = backbone modification: 5'-phosphorothioate
  modified_base 12: mod_base = OTHER; note = sugar modification: 2'-O-methoxyethylribose; note = backbone modification: 5'-phosphorothioate; note = thymine
  modified_base 13: mod_base = OTHER; note = backbone modification: 5'-phosphorothioate; note = thymine; note = sugar modification: 2'-O-methoxyethylribose
  modified_base 14: mod_base = m5c; mod_base = OTHER; note = backbone modification: 5'-phosphorothioate; note = sugar modification: 2'-O-methoxyethylribose
  modified_base 15: mod_base = OTHER; note = sugar modification: 2'-O-methoxyethylribose; note = backbone modification: 5'-phosphorothioate
  modified_base 16: mod_base = OTHER; note = sugar modification: 2'-O-methoxyethylribose; note = thymine; note = backbone modification: 5'-phosphorothioate
  modified_base 17: mod_base = OTHER; mod_base = m5c; note = sugar modification: 2-fluororibose; note = backbone modification: 5'-phosphorothioate
  modified_base 18: mod_base = m5c; mod_base = OTHER; note = sugar modification: 2-fluororibose
tgttcttgtacttcatcc

SEQ ID NO: 524 - RNA, 18 nt, synthetic construct
  source 1..18: mol_type = other RNA; note = Antisense oligonucleotide
  modified_base 1: mod_base = OTHER; note = thymine; note = backbone modification: 5'-phosphorothioate; note = sugar modification: 2-fluororibose
  modified_base 2: mod_base = OTHER; note = sugar modification: 2-fluororibose; note = backbone modification: 5'-phosphorothioate
  modified_base 3: mod_base = OTHER; note = sugar modification: 2-fluororibose; note = backbone modification: 5'-phosphorothioate; note = thymine
  modified_base 4: mod_base = OTHER; note = thymine; note = backbone modification: 5'-phosphorothioate; note = sugar modification: 2'-O-methoxyethylribose
  modified_base 5: mod_base = OTHER; mod_base = m5c; note = sugar modification: 2'-O-methoxyethylribose; note = backbone modification: 5'-phosphorothioate
  modified_base 6: mod_base = OTHER; note = sugar modification: 2'-O-methoxyethylribose; note = thymine; note = backbone modification: 5'-phosphorothioate
  modified_base 7: mod_base = OTHER; note = sugar modification: 2'-O-methoxyethylribose; note = thymine; note = backbone modification: 5'-phosphorothioate
  modified_base 8: mod_base = OTHER; note = sugar modification: 2'-O-methoxyethylribose; note = backbone modification: 5'-phosphorothioate
  modified_base 9: mod_base = OTHER; note = backbone modification: 5'-phosphorothioate; note = thymine; note = sugar modification: 2'-O-methoxyethylribose
  modified_base 10: mod_base = OTHER; note = backbone modification: 5'-phosphorothioate; note = sugar modification: 2'-O-methoxyethylribose
  modified_base 11: mod_base = OTHER; mod_base = m5c; note = backbone modification: 5'-phosphorothioate; note = sugar modification: 2'-O-methoxyethylribose
  modified_base 12: mod_base = OTHER; note = backbone modification: 5'-phosphorothioate; note = sugar modification: 2'-O-methoxyethylribose; note = thymine
  modified_base 13: mod_base = OTHER; note = sugar modification: 2'-O-methoxyethylribose; note = backbone modification: 5'-phosphorothioate; note = thymine
  modified_base 14: mod_base = OTHER; mod_base = m5c; note = backbone modification: 5'-phosphorothioate; note = sugar modification: 2'-O-methoxyethylribose
  modified_base 15: mod_base = OTHER; note = backbone modification: 5'-phosphorothioate; note = sugar modification: 2'-O-methoxyethylribose
  modified_base 16: mod_base = OTHER; note = sugar modification: 2-fluororibose; note = thymine; note = backbone modification: 5'-phosphorothioate
  modified_base 17: mod_base = OTHER; mod_base = m5c; note = sugar modification: 2-fluororibose; note = backbone modification: 5'-phosphorothioate
  modified_base 18: mod_base = OTHER; mod_base = m5c; note = sugar modification: 2-fluororibose
tgttcttgtacttcatcc

SEQ ID NO: 525 - RNA, 18 nt, synthetic construct
  source 1..18: mol_type = other RNA; note = Antisense oligonucleotide
  modified_base 1: mod_base = OTHER; note = sugar modification: 2-fluororibose; note = backbone modification: 5'-phosphorothioate; note = thymine
  modified_base 2: mod_base = OTHER; note = sugar modification: 2-fluororibose; note = backbone modification: 5'-phosphorothioate
  modified_base 3: mod_base = OTHER; note = sugar modification: 2-fluororibose; note = thymine; note = backbone modification: 5'-phosphorothioate
  modified_base 4: mod_base = OTHER; note = sugar modification: 2-fluororibose; note = backbone modification: 5'-phosphorothioate; note = thymine
  modified_base 5: mod_base = m5c; mod_base = OTHER; note = backbone modification: 5'-phosphorothioate; note = sugar modification: 2'-O-methoxyethylribose
  modified_base 6: mod_base = OTHER; note = backbone modification: 5'-phosphorothioate; note = thymine; note = sugar modification: 2'-O-methoxyethylribose
  modified_base 7: mod_base = OTHER; note = thymine; note = backbone modification: 5'-phosphorothioate; note = sugar modification: 2'-O-methoxyethylribose
  modified_base 8: mod_base = OTHER; note = sugar modification: 2'-O-methoxyethylribose; note = backbone modification: 5'-phosphorothioate
  modified_base 9: mod_base = OTHER; note = backbone modification: 5'-phosphorothioate; note = sugar modification: 2'-O-methoxyethylribose; note = thymine
  modified_base 10: mod_base = OTHER; note = sugar modification: 2'-O-methoxyethylribose; note = backbone modification: 5'-phosphorothioate
  modified_base 11: mod_base = m5c; mod_base = OTHER; note = backbone modification: 5'-phosphorothioate; note = sugar modification: 2'-O-methoxyethylribose
  modified_base 12: mod_base = OTHER; note = backbone modification: 5'-phosphorothioate; note = sugar modification: 2'-O-methoxyethylribose; note = thymine
  modified_base 13: mod_base = OTHER; note = sugar modification: 2'-O-methoxyethylribose; note = thymine; note = backbone modification: 5'-phosphorothioate
  modified_base 14: mod_base = m5c; mod_base = OTHER; note = sugar modification: 2'-O-methoxyethylribose; note = backbone modification: 5'-phosphorothioate
  modified_base 15: mod_base = OTHER; note = backbone modification: 5'-phosphorothioate; note = sugar modification: 2-fluororibose
  modified_base 16: mod_base = OTHER; note = backbone modification: 5'-phosphorothioate; note = thymine; note = sugar modification: 2-fluororibose
  modified_base 17: mod_base = m5c; mod_base = OTHER; note = sugar modification: 2-fluororibose; note = backbone modification: 5'-phosphorothioate
  modified_base 18: mod_base = OTHER; mod_base = m5c; note = sugar modification: 2-fluororibose
tgttcttgtacttcatcc

SEQ ID NO: 526 - RNA, 18 nt, synthetic construct
  source 1..18: mol_type = other RNA; note = Antisense oligonucleotide
  modified_base 1: mod_base = OTHER; note = backbone modification: 5'-phosphorothioate; note = thymine; note = sugar modification: 2-fluororibose
  modified_base 2: mod_base = OTHER; note = sugar modification: 2-fluororibose; note = backbone modification: 5'-phosphorothioate
  modified_base 3: mod_base = OTHER; note = sugar modification: 2-fluororibose; note = thymine; note = backbone modification: 5'-phosphorothioate
  modified_base 4: mod_base = OTHER; note = sugar modification: 2-fluororibose; note = backbone modification: 5'-phosphorothioate; note = thymine
  modified_base 5: mod_base = OTHER; mod_base = m5c; note = sugar modification: 2-fluororibose; note = backbone modification: 5'-phosphorothioate
  modified_base 6: mod_base = OTHER; note = sugar modification: 2'-O-methoxyethylribose; note = thymine; note = backbone modification: 5'-phosphorothioate
  modified_base 7: mod_base = OTHER; note = thymine; note = sugar modification: 2'-O-methoxyethylribose; note = backbone modification: 5'-phosphorothioate
  modified_base 8: mod_base = OTHER; note = backbone modification: 5'-phosphorothioate; note = sugar modification: 2'-O-methoxyethylribose
  modified_base 9: mod_base = OTHER; note = thymine; note = backbone modification: 5'-phosphorothioate; note = sugar modification: 2'-O-methoxyethylribose
  modified_base 10: mod_base = OTHER; note = sugar modification: 2'-O-methoxyethylribose; note = backbone modification: 5'-phosphorothioate
  modified_base 11: mod_base = OTHER; mod_base = m5c; note = sugar modification: 2'-O-methoxyethylribose; note = backbone modification: 5'-phosphorothioate
  modified_base 12: mod_base = OTHER; note = backbone modification: 5'-phosphorothioate; note = sugar modification: 2'-O-methoxyethylribose; note = thymine
  modified_base 13: mod_base = OTHER; note = thymine; note = backbone modification: 5'-phosphorothioate; note = sugar modification: 2'-O-methoxyethylribose
  modified_base 14: mod_base = OTHER; mod_base = m5c; note = backbone modification: 5'-phosphorothioate; note = sugar modification: 2-fluororibose
  modified_base 15: mod_base = OTHER; note = sugar modification: 2-fluororibose; note = backbone modification: 5'-phosphorothioate
  modified_base 16: mod_base = OTHER; note = thymine; note = backbone modification: 5'-phosphorothioate; note = sugar modification: 2-fluororibose
  modified_base 17: mod_base = OTHER; mod_base = m5c; note = sugar modification: 2-fluororibose; note = backbone modification: 5'-phosphorothioate
  modified_base 18: mod_base = OTHER; mod_base = m5c; note = sugar modification: 2-fluororibose
tgttcttgtacttcatcc

SEQ ID NO: 527 - RNA, 18 nt, synthetic construct
  source 1..18: mol_type = other RNA; note = Antisense oligonucleotide
  modified_base 1: mod_base = OTHER; note = sugar modification: 2-fluororibose; note = backbone modification: 5'-phosphorothioate; note = thymine
  modified_base 2: mod_base = OTHER; note = backbone modification: 5'-phosphorothioate; note = sugar modification: 2-fluororibose
  modified_base 3: mod_base = OTHER; note = sugar modification: 2-fluororibose; note = thymine; note = backbone modification: 5'-phosphorothioate
  modified_base 4: mod_base = OTHER; note = backbone modification: 5'-phosphorothioate; note = thymine; note = sugar modification: 2-fluororibose
  modified_base 5: mod_base = OTHER; mod_base = m5c; note = backbone modification: 5'-phosphorothioate; note = sugar modification: 2-fluororibose
  modified_base 6: mod_base = OTHER; note = sugar modification: 2-fluororibose; note = backbone modification: 5'-phosphorothioate; note = thymine
  modified_base 7: mod_base = OTHER; note = backbone modification: 5'-phosphorothioate; note = thymine; note = sugar modification: 2'-O-methoxyethylribose
  modified_base 8: mod_base = OTHER; note = backbone modification: 5'-phosphorothioate; note = sugar modification: 2'-O-methoxyethylribose
  modified_base 9: mod_base = OTHER; note = backbone modification: 5'-phosphorothioate; note = thymine; note = sugar modification: 2'-O-methoxyethylribose
  modified_base 10: mod_base = OTHER; note = sugar modification: 2'-O-methoxyethylribose; note = backbone modification: 5'-phosphorothioate
  modified_base 11: mod_base = m5c; mod_base = OTHER; note = backbone modification: 5'-phosphorothioate; note = sugar modification: 2'-O-methoxyethylribose
  modified_base 12: mod_base = OTHER; note = thymine; note = backbone modification: 5'-phosphorothioate; note = sugar modification: 2'-O-methoxyethylribose
  modified_base 13: mod_base = OTHER; note = backbone modification: 5'-phosphorothioate; note = thymine; note = sugar modification: 2-fluororibose
  modified_base 14: mod_base = OTHER; mod_base = m5c; note = sugar modification: 2-fluororibose; note = backbone modification: 5'-phosphorothioate
  modified_base 15: mod_base = OTHER; note = sugar modification: 2-fluororibose; note = backbone modification: 5'-phosphorothioate
  modified_base 16: mod_base = OTHER; note = thymine; note = backbone modification: 5'-phosphorothioate; note = sugar modification: 2-fluororibose
  modified_base 17: mod_base = m5c; mod_base = OTHER; note = backbone modification: 5'-phosphorothioate; note = sugar modification: 2-fluororibose
  modified_base 18: mod_base = OTHER; mod_base = m5c; note = sugar modification: 2-fluororibose
tgttcttgtacttcatcc

SEQ ID NO: 528 - RNA, 18 nt, synthetic construct
  source 1..18: mol_type = other RNA; note = Antisense oligonucleotide
  modified_base 1: mod_base = OTHER; note = backbone modification: 5'-phosphorothioate; note = sugar modification: 2-fluororibose; note = thymine
  modified_base 2: mod_base = OTHER; note = backbone modification: 5'-phosphorothioate; note = sugar modification: 2-fluororibose
  modified_base 3: mod_base = OTHER; note = thymine; note = backbone modification: 5'-phosphorothioate; note = sugar modification: 2-fluororibose
  modified_base 4: mod_base = OTHER; note = sugar modification: 2-fluororibose; note = thymine; note = backbone modification: 5'-phosphorothioate
  modified_base 5: mod_base = m5c; mod_base = OTHER; note = sugar modification: 2-fluororibose; note = backbone modification: 5'-phosphorothioate
  modified_base 6: mod_base = OTHER; note = backbone modification: 5'-phosphorothioate; note = sugar modification: 2-fluororibose; note = thymine
  modified_base 7: mod_base = OTHER; note = backbone modification: 5'-phosphorothioate; note = sugar modification: 2-fluororibose; note = thymine
  modified_base 8: mod_base = OTHER; note = backbone modification: 5'-phosphorothioate; note = sugar modification: 2'-O-methoxyethylribose
  modified_base 9: mod_base = OTHER; note = thymine; note = sugar modification: 2'-O-methoxyethylribose; note = backbone modification: 5'-phosphorothioate
  modified_base 10: mod_base = OTHER; note = backbone modification: 5'-phosphorothioate; note = sugar modification: 2'-O-methoxyethylribose
  modified_base 11: mod_base = OTHER; mod_base = m5c; note = sugar modification: 2'-O-methoxyethylribose; note = backbone modification: 5'-phosphorothioate
  modified_base 12: mod_base = OTHER; note = sugar modification: 2-fluororibose; note = thymine; note = backbone modification: 5'-phosphorothioate
  modified_base 13: mod_base = OTHER; note = backbone modification: 5'-phosphorothioate; note = thymine; note = sugar modification: 2-fluororibose
  modified_base 14: mod_base = m5c; mod_base = OTHER; note = backbone modification: 5'-phosphorothioate; note = sugar modification: 2-fluororibose
  modified_base 15: mod_base = OTHER; note = backbone modification: 5'-phosphorothioate; note = sugar modification: 2-fluororibose
  modified_base 16: mod_base = OTHER; note = sugar modification: 2-fluororibose; note = backbone modification: 5'-phosphorothioate; note = thymine
  modified_base 17: mod_base = OTHER; mod_base = m5c; note = backbone modification: 5'-phosphorothioate; note = sugar modification: 2-fluororibose
  modified_base 18: mod_base = OTHER; mod_base = m5c; note = sugar modification: 2-fluororibose
tgttcttgtacttcatcc

SEQ ID NO: 529 - RNA, 18 nt, synthetic construct
  source 1..18: mol_type = other RNA; note = Antisense oligonucleotide
  modified_base 1: mod_base = OTHER; note = thymine; note = sugar modification: 2-fluororibose; note = backbone modification: 5'-phosphorothioate
  modified_base 2: mod_base = OTHER; note = backbone modification: 5'-phosphorothioate; note = sugar modification: 2-fluororibose
  modified_base 3: mod_base = OTHER; note = sugar modification: 2-fluororibose; note = thymine; note = backbone modification: 5'-phosphorothioate
  modified_base 4: mod_base = OTHER; note = sugar modification: 2-fluororibose; note = backbone modification: 5'-phosphorothioate; note = thymine
  modified_base 5: mod_base = OTHER; mod_base = m5c; note = sugar modification: 2-fluororibose; note = backbone modification: 5'-phosphorothioate
  modified_base 6: mod_base = OTHER; note = thymine; note = sugar modification: 2-fluororibose; note = backbone modification: 5'-phosphorothioate
  modified_base 7: mod_base = OTHER; note = thymine; note = backbone modification: 5'-phosphorothioate; note = sugar modification: 2-fluororibose
  modified_base 8: mod_base = OTHER; note = sugar modification: 2-fluororibose; note = backbone modification: 5'-phosphorothioate
  modified_base 9: mod_base = OTHER; note = thymine; note = backbone modification: 5'-phosphorothioate; note = sugar modification: 2'-O-methoxyethylribose
  modified_base 10: mod_base = OTHER; note = backbone modification: 5'-phosphorothioate; note = sugar modification: 2'-O-methoxyethylribose
  modified_base 11: mod_base = m5c; mod_base = OTHER; note = backbone modification: 5'-phosphorothioate; note = sugar modification: 2-fluororibose
  modified_base 12: mod_base = OTHER; note = sugar modification: 2-fluororibose; note = thymine; note = backbone modification: 5'-phosphorothioate
  modified_base 13: mod_base = OTHER; note = thymine; note = backbone modification: 5'-phosphorothioate; note = sugar modification: 2-fluororibose
  modified_base 14: mod_base = m5c; mod_base = OTHER; note = backbone modification: 5'-phosphorothioate; note = sugar modification: 2-fluororibose
  modified_base 15: mod_base = OTHER; note = backbone modification: 5'-phosphorothioate; note = sugar modification: 2-fluororibose
  modified_base 16: mod_base = OTHER; note = sugar modification: 2-fluororibose; note = thymine; note = backbone modification: 5'-phosphorothioate
  modified_base 17: mod_base = m5c; mod_base = OTHER; note = sugar modification: 2-fluororibose; note = backbone modification: 5'-phosphorothioate
  modified_base 18: mod_base = m5c; mod_base = OTHER; note = sugar modification: 2-fluororibose
tgttcttgtacttcatcc

SEQ ID NO: 530 - RNA, 18 nt, synthetic construct
  source 1..18: mol_type = other RNA; note = Antisense oligonucleotide
  modified_base 1: mod_base = OTHER; note = thymine; note = backbone modification: 5'-phosphorothioate; note = sugar modification: 2-fluororibose
  modified_base 2: mod_base = OTHER; note = backbone modification: 5'-phosphorothioate; note = sugar modification: 2-fluororibose
  modified_base 3: mod_base = OTHER; note = sugar modification: 2-fluororibose; note = thymine; note = backbone modification: 5'-phosphorothioate
  modified_base 4: mod_base = OTHER; note = backbone modification: 5'-phosphorothioate; note = thymine; note = sugar modification: 2-fluororibose
  modified_base 5: mod_base = m5c; mod_base = OTHER; note = backbone modification: 5'-phosphorothioate; note = sugar modification: 2-fluororibose
  modified_base 6: mod_base = OTHER; note = sugar modification: 2-fluororibose; note = thymine; note = backbone modification: 5'-phosphorothioate
  modified_base 7: mod_base = OTHER; note = backbone modification: 5'-phosphorothioate; note = sugar modification: 2-fluororibose; note = thymine
  modified_base 8: mod_base = OTHER; note = sugar modification: 2-fluororibose; note = backbone modification: 5'-phosphorothioate
  modified_base 9: mod_base = OTHER; note = thymine; note = sugar modification: 2-fluororibose; note = backbone modification: 5'-phosphorothioate
  modified_base 10: mod_base = OTHER; note = sugar modification: 2-fluororibose; note = backbone modification: 5'-phosphorothioate
  modified_base 11: mod_base = OTHER; mod_base = m5c; note = backbone modification: 5'-phosphorothioate; note = sugar modification: 2-fluororibose
  modified_base 12: mod_base = OTHER; note = backbone modification: 5'-phosphorothioate; note = thymine; note = sugar modification: 2-fluororibose
  modified_base 13: mod_base = OTHER; note = thymine; note = backbone modification: 5'-phosphorothioate; note = sugar modification: 2-fluororibose
  modified_base 14: mod_base = m5c; mod_base = OTHER; note = backbone modification: 5'-phosphorothioate; note = sugar modification: 2-fluororibose
  modified_base 15: mod_base = OTHER; note = backbone modification: 5'-phosphorothioate; note = sugar modification: 2-fluororibose
  modified_base 16: mod_base = OTHER; note = sugar modification: 2-fluororibose; note = backbone modification: 5'-phosphorothioate; note = thymine
  modified_base 17: mod_base = m5c; mod_base = OTHER; note = sugar modification: 2-fluororibose; note = backbone modification: 5'-phosphorothioate
  modified_base 18: mod_base = m5c; mod_base = OTHER; note = sugar modification: 2-fluororibose
tgttcttgtacttcatcc

SEQ ID NO: 531 - RNA, 18 nt, synthetic construct
  source 1..18: mol_type = other RNA; note = Antisense oligonucleotide
  modified_base 1: mod_base = OTHER; note = backbone modification: 5'-phosphorothioate; note = thymine; note = sugar modification: 2'-O-methoxyethylribose
  modified_base 2: mod_base = OTHER; note = sugar modification: 2-fluororibose; note = backbone modification: 5'-phosphorothioate
  modified_base 3: mod_base = OTHER; note = sugar modification: 2'-O-methoxyethylribose; note = backbone modification: 5'-phosphorothioate; note = thymine
  modified_base 4: mod_base = OTHER; note = sugar modification: 2-fluororibose; note = thymine; note = backbone modification: 5'-phosphorothioate
  modified_base 5: mod_base = m5c; mod_base = OTHER; note = backbone modification: 5'-phosphorothioate; note = sugar modification: 2'-O-methoxyethylribose
  modified_base 6: mod_base = OTHER; note = thymine; note = backbone modification: 5'-phosphorothioate; note = sugar modification: 2-fluororibose
  modified_base 7: mod_base = OTHER; note = backbone modification: 5'-phosphorothioate; note = sugar modification: 2'-O-methoxyethylribose; note = thymine
  modified_base 8: mod_base = OTHER; note = backbone modification: 5'-phosphorothioate; note = sugar modification: 2-fluororibose
  modified_base 9: mod_base = OTHER; note = sugar modification: 2'-O-methoxyethylribose; note = backbone modification: 5'-phosphorothioate; note = thymine
  modified_base 10: mod_base = OTHER; note = sugar modification: 2-fluororibose; note = backbone modification: 5'-phosphorothioate
  modified_base 11: mod_base = m5c; mod_base = OTHER; note = sugar modification: 2'-O-methoxyethylribose; note = backbone modification: 5'-phosphorothioate
  modified_base 12: mod_base = OTHER; note = sugar modification: 2-fluororibose; note = backbone modification: 5'-phosphorothioate; note = thymine
  modified_base 13: mod_base = OTHER; note = backbone modification: 5'-phosphorothioate; note = sugar modification: 2'-O-methoxyethylribose; note = thymine
  modified_base 14: mod_base = m5c; mod_base = OTHER; note = backbone modification: 5'-phosphorothioate; note = sugar modification: 2-fluororibose
  modified_base 15: mod_base = OTHER; note = backbone modification: 5'-phosphorothioate; note = sugar modification: 2'-O-methoxyethylribose
  modified_base 16: mod_base = OTHER; note = backbone modification: 5'-phosphorothioate; note = thymine; note = sugar modification: 2-fluororibose
  modified_base 17: mod_base = m5c; mod_base = OTHER; note = sugar modification: 2'-O-methoxyethylribose; note = backbone modification: 5'-phosphorothioate
  modified_base 18: mod_base = m5c; mod_base = OTHER; note = sugar modification: 2-fluororibose
tgttcttgtacttcatcc

SEQ ID NO: 532 - RNA, 18 nt, synthetic construct
  source 1..18: mol_type = other RNA; note = Antisense oligonucleotide
  modified_base 1: mod_base = OTHER; note = thymine; note = backbone modification: 5'-phosphorothioate; note = sugar modification: 2-fluororibose
  modified_base 2: mod_base = OTHER; note = sugar modification: 2'-O-methoxyethylribose; note = backbone modification: 5'-phosphorothioate
  modified_base 3: mod_base = OTHER; note = backbone modification: 5'-phosphorothioate; note = sugar modification: 2-fluororibose; note = thymine
  modified_base 4: mod_base = OTHER; note = sugar modification: 2'-O-methoxyethylribose; note = thymine; note = backbone modification: 5'-phosphorothioate
  modified_base 5: mod_base = m5c; mod_base = OTHER; note = sugar modification: 2-fluororibose; note = backbone modification: 5'-phosphorothioate
  modified_base 6: mod_base = OTHER; note = sugar modification: 2'-O-methoxyethylribose; note = backbone modification: 5'-phosphorothioate; note = thymine
  modified_base 7: mod_base = OTHER; note = thymine; note = sugar modification: 2-fluororibose; note = backbone modification: 5'-phosphorothioate
  modified_base 8: mod_base = OTHER; note = backbone modification: 5'-phosphorothioate; note = sugar modification: 2'-O-methoxyethylribose
  modified_base 9: mod_base = OTHER; note = sugar modification: 2-fluororibose; note = thymine; note = backbone modification: 5'-phosphorothioate
  modified_base 10: mod_base = OTHER; note = backbone modification: 5'-phosphorothioate; note = sugar modification: 2'-O-methoxyethylribose
  modified_base 11: mod_base = m5c; mod_base = OTHER; note = sugar modification: 2-fluororibose; note = backbone modification: 5'-phosphorothioate
  modified_base 12: mod_base = OTHER; note = backbone modification: 5'-phosphorothioate; note = thymine; note = sugar modification: 2'-O-methoxyethylribose
  modified_base 13: mod_base = OTHER; note = backbone modification: 5'-phosphorothioate; note = thymine; note = sugar modification: 2-fluororibose
  modified_base 14: mod_base = OTHER; mod_base = m5c; note = backbone modification: 5'-phosphorothioate; note = sugar modification: 2'-O-methoxyethylribose
  modified_base 15: mod_base = OTHER; note = sugar modification: 2-fluororibose; note = backbone modification: 5'-phosphorothioate
  modified_base 16: mod_base = OTHER; note = sugar modification: 2'-O-methoxyethylribose; note = backbone modification: 5'-phosphorothioate; note = thymine
  modified_base 17: mod_base = m5c; mod_base = OTHER; note = sugar modification: 2-fluororibose; note = backbone modification: 5'-phosphorothioate
  modified_base 18: mod_base = OTHER; mod_base = m5c; note = sugar modification: 2'-O-methoxyethylribose
tgttcttgtacttcatcc

SEQ ID NO: 533 - RNA, 18 nt, synthetic construct
  source 1..18: mol_type = other RNA; note = Antisense oligonucleotide
  modified_base 1: mod_base = OTHER; note = thymine; note = backbone modification: 5'-phosphorothioate; note = sugar modification: 2-fluororibose
  modified_base 2: mod_base = OTHER; note = sugar modification: 2-fluororibose; note = backbone modification: 5'-phosphorothioate
  modified_base 3: mod_base = OTHER; note = thymine; note = backbone modification: 5'-phosphorothioate; note = sugar modification: 2'-O-methoxyethylribose
  modified_base 4: mod_base = OTHER; note = sugar modification: 2'-O-methoxyethylribose; note = backbone modification: 5'-phosphorothioate; note = thymine
  modified_base 5: mod_base = m5c; mod_base = OTHER; note = sugar modification: 2-fluororibose; note = backbone modification: 5'-phosphorothioate
  modified_base 6: mod_base = OTHER; note = backbone modification: 5'-phosphorothioate; note = thymine; note = sugar modification: 2-fluororibose
  modified_base 7: mod_base = OTHER; note = backbone modification: 5'-phosphorothioate; note = thymine; note = sugar modification: 2'-O-methoxyethylribose
  modified_base 8: mod_base = OTHER; note = backbone modification: 5'-phosphorothioate; note = sugar modification: 2'-O-methoxyethylribose
  modified_base 9: mod_base = OTHER; note = sugar modification: 2-fluororibose; note = backbone modification: 5'-phosphorothioate; note = thymine
  modified_base 10: mod_base = OTHER; note = sugar modification: 2-fluororibose; note = backbone modification: 5'-phosphorothioate
  modified_base 11: mod_base = m5c; mod_base = OTHER; note = backbone modification: 5'-phosphorothioate; note = sugar modification: 2'-O-methoxyethylribose
  modified_base 12: mod_base = OTHER; note = thymine; note = backbone modification: 5'-phosphorothioate; note = sugar modification: 2'-O-methoxyethylribose
  modified_base 13: mod_base = OTHER; note = backbone modification: 5'-phosphorothioate; note = thymine; note = sugar modification: 2-fluororibose
  modified_base 14: mod_base = OTHER; mod_base = m5c; note = sugar modification: 2-fluororibose; note = backbone modification: 5'-phosphorothioate
  modified_base 15: mod_base = OTHER; note = sugar modification: 2'-O-methoxyethylribose; note = backbone modification: 5'-phosphorothioate
  modified_base 16: mod_base = OTHER; note = thymine; note = sugar modification: 2'-O-methoxyethylribose; note = backbone modification: 5'-phosphorothioate
  modified_base 17: mod_base = OTHER; mod_base = m5c; note = sugar modification: 2-fluororibose; note = backbone modification: 5'-phosphorothioate
  modified_base 18: mod_base = m5c; mod_base = OTHER; note = sugar modification: 2-fluororibose
tgttcttgtacttcatcc

SEQ ID NO: 534 - RNA, 18 nt, synthetic construct
  source 1..18: mol_type = other RNA; note = Antisense oligonucleotide
  modified_base 1: mod_base = OTHER; note = backbone modification: 5'-phosphorothioate; note = thymine; note = sugar modification: 2-fluororibose
  modified_base 2: mod_base = OTHER; note = backbone modification: 5'-phosphorothioate; note = sugar modification: 2-fluororibose
  modified_base 3: mod_base = OTHER; note = thymine; note = sugar modification: 2-fluororibose; note = backbone modification: 5'-phosphorothioate
  modified_base 4: mod_base = OTHER; note = sugar modification: 2'-O-methoxyethylribose; note = backbone modification: 5'-phosphorothioate; note = thymine
  modified_base 5: mod_base = OTHER; mod_base = m5c; note = sugar modification: 2'-O-methoxyethylribose; note = backbone modification: 5'-phosphorothioate
  modified_base 6: mod_base = OTHER; note = thymine; note = backbone modification: 5'-phosphorothioate; note = sugar modification: 2'-O-methoxyethylribose
  modified_base 7: mod_base = OTHER; note = sugar modification: 2-fluororibose; note = backbone modification: 5'-phosphorothioate; note = thymine
  modified_base 8: mod_base = OTHER; note = backbone modification: 5'-phosphorothioate; note = sugar modification: 2-fluororibose
  modified_base 9: mod_base = OTHER; note = backbone modification: 5'-phosphorothioate; note = sugar modification: 2-fluororibose; note = thymine
  modified_base 10: mod_base = OTHER; note = backbone modification: 5'-phosphorothioate; note = sugar modification: 2'-O-methoxyethylribose
  modified_base 11: mod_base = OTHER; mod_base = m5c; note = backbone modification: 5'-phosphorothioate; note = sugar modification: 2'-O-methoxyethylribose
  modified_base 12: mod_base = OTHER; note = sugar modification: 2'-O-methoxyethylribose; note = backbone modification: 5'-phosphorothioate; note = thymine
  modified_base 13: mod_base = OTHER; note = thymine; note = sugar modification: 2-fluororibose; note = backbone modification: 5'-phosphorothioate
  modified_base 14: mod_base = m5c; mod_base = OTHER; note = sugar modification: 2-fluororibose; note = backbone modification: 5'-phosphorothioate
  modified_base 15: mod_base = OTHER; note = sugar modification: 2-fluororibose; note = backbone modification: 5'-phosphorothioate
  modified_base 16: mod_base = OTHER; note = sugar modification: 2'-O-methoxyethylribose; note = thymine; note = backbone modification: 5'-phosphorothioate
  modified_base 17: mod_base = m5c; mod_base = OTHER; note = sugar modification: 2'-O-methoxyethylribose; note = backbone modification: 5'-phosphorothioate
  modified_base 18: mod_base = OTHER; mod_base = m5c; note = sugar modification: 2'-O-methoxyethylribose
tgttcttgtacttcatcc

SEQ ID NO: 535 - RNA, 18 nt, synthetic construct
  source 1..18: mol_type = other RNA; note = Antisense oligonucleotide
  modified_base 1: mod_base = OTHER; note = sugar modification: 2'-O-methoxyethylribose; note = thymine; note = backbone modification: 5'-phosphorothioate
  modified_base 2: mod_base = OTHER; note = backbone modification: 5'-phosphorothioate; note = sugar modification: 2'-O-methoxyethylribose
  modified_base 3: mod_base = OTHER; note = thymine; note = sugar modification: 2'-O-methoxyethylribose; note = backbone modification: 5'-phosphorothioate
  modified_base 4: mod_base = OTHER; note = sugar modification: 2'-O-methoxyethylribose; note = thymine; note = backbone modification: 5'-phosphorothioate
  modified_base 5: mod_base = OTHER; mod_base = m5c; note = backbone modification: 5'-phosphorothioate; note = sugar modification: 2'-O-methoxyethylribose
  modified_base 6: mod_base = OTHER; note = thymine; note = sugar modification: 2'-O-methoxyethylribose; note = backbone modification: 5'-phosphorothioate
  modified_base 7: mod_base = OTHER; note = thymine; note = backbone modification: 5'-phosphorothioate; note = sugar modification: 2'-O-methoxyethylribose
  modified_base 8: mod_base = OTHER; note = sugar modification: 2'-O-methoxyethylribose; note = backbone modification: 5'-phosphorothioate
  modified_base 9: mod_base = OTHER; note = thymine; note = backbone modification: 5'-phosphorothioate; note = sugar modification: 2-fluororibose
  modified_base 10: mod_base = OTHER; note = sugar modification: 2-fluororibose; note = backbone modification: 5'-phosphorothioate
  modified_base 11: mod_base = OTHER; mod_base = m5c; note = backbone modification: 5'-phosphorothioate; note = sugar modification: 2'-O-methoxyethylribose
  modified_base 12: mod_base = OTHER; note = backbone modification: 5'-phosphorothioate; note = thymine; note = sugar modification: 2'-O-methoxyethylribose
  modified_base 13: mod_base = OTHER; note = backbone modification: 5'-phosphorothioate; note = sugar modification: 2'-O-methoxyethylribose; note = thymine
  modified_base 14: mod_base = m5c; mod_base = OTHER; note = sugar modification: 2'-O-methoxyethylribose; note = backbone modification: 5'-phosphorothioate
  modified_base 15: mod_base = OTHER; note = sugar modification: 2'-O-methoxyethylribose; note = backbone modification: 5'-phosphorothioate
  modified_base 16: mod_base = OTHER; note = thymine; note = sugar modification: 2'-O-methoxyethylribose; note = backbone modification: 5'-phosphorothioate
  modified_base 17: mod_base = OTHER; mod_base = m5c; note = sugar modification: 2'-O-methoxyethylribose; note = backbone modification: 5'-phosphorothioate
  modified_base 18: mod_base = m5c; mod_base = OTHER; note = sugar modification: 2'-O-methoxyethylribose
tgttcttgtacttcatcc

SEQ ID NO: 536 - RNA, 18 nt, synthetic construct
  source 1..18: mol_type = other RNA; note = Antisense oligonucleotide
  modified_base 1: mod_base = OTHER; note = backbone modification: 5'-phosphorothioate; note = sugar modification: 2'-O-methoxyethylribose; note = thymine
  modified_base 2: mod_base = OTHER; note = sugar modification: 2'-O-methoxyethylribose; note = backbone modification: 5'-phosphorothioate
  modified_base 3: mod_base = OTHER; note = backbone modification: 5'-phosphorothioate; note = thymine; note = sugar modification: 2'-O-methoxyethylribose
  modified_base 4: mod_base = OTHER; note = backbone modification: 5'-phosphorothioate; note = sugar modification: 2'-O-methoxyethylribose; note = thymine
  modified_base 5: mod_base = OTHER; mod_base = m5c; note = sugar modification: 2'-O-methoxyethylribose; note = backbone modification: 5'-phosphorothioate
  modified_base 6: mod_base = OTHER; note = backbone modification: 5'-phosphorothioate; note = sugar modification: 2'-O-methoxyethylribose; note = thymine
  modified_base 7: mod_base = OTHER; note = backbone modification: 5'-phosphorothioate; note = thymine; note = sugar modification: 2'-O-methoxyethylribose
  modified_base 8: mod_base = OTHER; note = backbone modification: 5'-phosphorothioate; note = sugar modification: 2-fluororibose
  modified_base 9: mod_base = OTHER; note = thymine; note = sugar modification: 2-fluororibose; note = backbone modification: 5'-phosphorothioate
  modified_base 10: mod_base = OTHER; note = sugar modification: 2-fluororibose; note = backbone modification: 5'-phosphorothioate
  modified_base 11: mod_base = m5c; mod_base = OTHER; note = sugar modification: 2-fluororibose; note = backbone modification: 5'-phosphorothioate
  modified_base 12: mod_base = OTHER; note = backbone modification: 5'-phosphorothioate; note = thymine; note = sugar modification: 2'-O-methoxyethylribose
  modified_base 13: mod_base = OTHER; note = thymine; note = backbone modification: 5'-phosphorothioate; note = sugar modification: 2'-O-methoxyethylribose
  modified_base 14: mod_base = m5c; mod_base = OTHER; note = sugar modification: 2'-O-methoxyethylribose; note = backbone modification: 5'-phosphorothioate
  modified_base 15: mod_base = OTHER; note = backbone modification: 5'-phosphorothioate; note = sugar modification: 2'-O-methoxyethylribose
  modified_base 16: mod_base = OTHER; note = sugar modification: 2'-O-methoxyethylribose; note = backbone modification: 5'-phosphorothioate; note = thymine
  modified_base 17: mod_base = OTHER; mod_base = m5c; note = sugar modification: 2'-O-methoxyethylribose; note = backbone modification: 5'-phosphorothioate
  modified_base 18: mod_base = OTHER; mod_base = m5c; note = sugar modification: 2'-O-methoxyethylribose
tgttcttgtacttcatcc

SEQ ID NO: 537 - RNA, 18 nt, synthetic construct
  source 1..18: mol_type = other RNA; note = Antisense oligonucleotide
  modified_base 1: mod_base = OTHER; note = backbone modification: 5'-phosphorothioate; note = thymine; note = sugar modification: 2'-O-methoxyethylribose
  modified_base 2: mod_base = OTHER; note = sugar modification: 2'-O-methoxyethylribose; note = backbone modification: 5'-phosphorothioate
  modified_base 3: mod_base = OTHER; note = thymine; note = sugar modification: 2'-O-methoxyethylribose; note = backbone modification: 5'-phosphorothioate
  modified_base 4: mod_base = OTHER; note = thymine; note = backbone modification: 5'-phosphorothioate; note = sugar modification: 2'-O-methoxyethylribose
  modified_base 5: mod_base = OTHER; mod_base = m5c; note = sugar modification: 2'-O-methoxyethylribose; note = backbone modification: 5'-phosphorothioate
  modified_base 6: mod_base = OTHER; note = sugar modification: 2'-O-methoxyethylribose; note = backbone modification: 5'-phosphorothioate; note = thymine
  modified_base 7: mod_base = OTHER; note = backbone modification: 5'-phosphorothioate; note = sugar modification: 2-fluororibose; note = thymine
  modified_base 8: mod_base = OTHER; note = sugar modification: 2-fluororibose; note = backbone modification: 5'-phosphorothioate
  modified_base 9: mod_base = OTHER; note = backbone modification: 5'-phosphorothioate; note = thymine; note = sugar modification: 2-fluororibose
  modified_base 10: mod_base = OTHER; note = backbone modification: 5'-phosphorothioate; note = sugar modification: 2-fluororibose
  modified_base 11: mod_base = m5c; mod_base = OTHER; note = sugar modification: 2-fluororibose; note = backbone modification: 5'-phosphorothioate
  modified_base 12: mod_base = OTHER; note = sugar modification: 2-fluororibose; note = thymine; note = backbone modification: 5'-phosphorothioate
  modified_base 13: mod_base = OTHER; note = thymine; note = sugar modification: 2'-O-methoxyethylribose; note = backbone modification: 5'-phosphorothioate
  modified_base 14: mod_base = m5c; mod_base = OTHER; note = sugar modification: 2'-O-methoxyethylribose; note = backbone modification: 5'-phosphorothioate
  modified_base 15: mod_base = OTHER; note = backbone modification: 5'-phosphorothioate; note = sugar modification: 2'-O-methoxyethylribose
  modified_base 16: mod_base = OTHER; note = thymine; note = sugar modification: 2'-O-methoxyethylribose; note = backbone modification: 5'-phosphorothioate
  modified_base 17: mod_base = m5c; mod_base = OTHER; note = sugar modification: 2'-O-methoxyethylribose; note = backbone modification: 5'-phosphorothioate
  modified_base 18: mod_base = m5c; mod_base = OTHER; note = sugar modification: 2'-O-methoxyethylribose
tgttcttgtacttcatcc

SEQ ID NO: 538 - RNA, 18 nt, synthetic construct
  source 1..18: mol_type = other RNA; note = Antisense oligonucleotide
  modified_base 1: mod_base = OTHER; note = thymine; note = backbone modification: 5'-phosphorothioate; note = sugar modification: 2'-O-methoxyethylribose
  modified_base 2: mod_base = OTHER; note = backbone modification: 5'-phosphorothioate; note = sugar modification: 2'-O-methoxyethylribose
  modified_base 3: mod_base = OTHER; note = thymine; note = sugar modification: 2'-O-methoxyethylribose; note = backbone modification: 5'-phosphorothioate
  modified_base 4: mod_base = OTHER; note = sugar modification: 2'-O-methoxyethylribose; note = backbone modification: 5'-phosphorothioate; note = thymine
  modified_base 5: mod_base = OTHER; mod_base = m5c; note = backbone modification: 5'-phosphorothioate; note = sugar modification: 2'-O-methoxyethylribose
  modified_base 6: mod_base = OTHER; note = backbone modification: 5'-phosphorothioate; note = sugar modification: 2-fluororibose; note = thymine
  modified_base 7: mod_base = OTHER; note = backbone modification: 5'-phosphorothioate; note = thymine; note = sugar modification: 2-fluororibose
  modified_base 8: mod_base = OTHER; note = backbone modification: 5'-phosphorothioate; note = sugar modification: 2-fluororibose
  modified_base 9: mod_base = OTHER; note = thymine; note = backbone modification: 5'-phosphorothioate; note = sugar modification: 2-fluororibose
  modified_base 10: mod_base = OTHER; note = sugar modification: 2-fluororibose; note = backbone modification: 5'-phosphorothioate
  modified_base 11: mod_base = m5c; mod_base = OTHER; note = sugar modification: 2-fluororibose; note = backbone modification: 5'-phosphorothioate
  modified_base 12: mod_base = OTHER; note = backbone modification: 5'-phosphorothioate; note = thymine; note = sugar modification: 2-fluororibose
  modified_base 13: mod_base = OTHER; note = sugar modification: 2-fluororibose; note = thymine; note = backbone modification: 5'-phosphorothioate
  modified_base 14: mod_base = OTHER; mod_base = m5c; note = sugar modification: 2'-O-methoxyethylribose; note = backbone modification: 5'-phosphorothioate
  modified_base 15: mod_base = OTHER; note = sugar modification: 2'-O-methoxyethylribose; note = backbone modification: 5'-phosphorothioate
  modified_base 16: mod_base = OTHER; note = sugar modification: 2'-O-methoxyethylribose; note = thymine; note = backbone modification: 5'-phosphorothioate
  modified_base 17: mod_base = OTHER; mod_base = m5c; note = sugar modification: 2'-O-methoxyethylribose; note = backbone modification: 5'-phosphorothioate
  modified_base 18: mod_base = m5c; mod_base = OTHER; note = sugar modification: 2'-O-methoxyethylribose
tgttcttgtacttcatcc

SEQ ID NO: 539 - RNA, 18 nt, synthetic construct
  source 1..18: mol_type = other RNA; note = Antisense oligonucleotide
  modified_base 1: mod_base = OTHER; note = backbone modification: 5'-phosphorothioate; note = sugar modification: 2'-O-methoxyethylribose; note = thymine
  modified_base 2: mod_base = OTHER; note = sugar modification: 2'-O-methoxyethylribose; note = backbone modification: 5'-phosphorothioate
  modified_base 3: mod_base = OTHER; note = thymine; note = sugar modification: 2'-O-methoxyethylribose; note = backbone modification: 5'-phosphorothioate
  modified_base 4: mod_base = OTHER; note = backbone modification: 5'-phosphorothioate; note = thymine; note = sugar modification: 2'-O-methoxyethylribose
  modified_base 5: mod_base = m5c; mod_base = OTHER; note = backbone modification: 5'-phosphorothioate; note = sugar modification: 2-fluororibose
  modified_base 6: mod_base = OTHER; note = backbone modification: 5'-phosphorothioate; note = sugar modification: 2-fluororibose; note = thymine
  modified_base 7: mod_base = OTHER; note = backbone modification: 5'-phosphorothioate; note = sugar modification: 2-fluororibose; note = thymine
  modified_base 8: mod_base = OTHER; note = sugar modification: 2-fluororibose; note = backbone modification: 5'-phosphorothioate
  modified_base 9: mod_base = OTHER; note = sugar modification: 2-fluororibose; note = thymine; note = backbone modification: 5'-phosphorothioate
  modified_base 10: mod_base = OTHER; note = sugar modification: 2-fluororibose; note = backbone modification: 5'-phosphorothioate
  modified_base 11: mod_base = OTHER; mod_base = m5c; note = backbone modification: 5'-phosphorothioate; note = sugar modification: 2-fluororibose
  modified_base 12: mod_base = OTHER; note = sugar modification: 2-fluororibose; note = backbone modification: 5'-phosphorothioate; note = thymine
  modified_base 13: mod_base = OTHER; note = thymine; note = sugar modification: 2-fluororibose; note = backbone modification: 5'-phosphorothioate
  modified_base 14: mod_base = m5c; mod_base = OTHER; note = backbone modification: 5'-phosphorothioate; note = sugar modification: 2-fluororibose
  modified_base 15: mod_base = OTHER; note = sugar modification: 2'-O-methoxyethylribose; note = backbone modification: 5'-phosphorothioate
  modified_base 16: mod_base = OTHER; note = sugar modification: 2'-O-methoxyethylribose; note = backbone modification: 5'-phosphorothioate; note = thymine
  modified_base 17: mod_base = OTHER; mod_base = m5c; note = backbone modification: 5'-phosphorothioate; note = sugar modification: 2'-O-methoxyethylribose
  modified_base 18: mod_base = OTHER; mod_base = m5c; note = sugar modification: 2'-O-methoxyethylribose
tgttcttgtacttcatcc

SEQ ID NO: 540 - RNA, 18 nt, synthetic construct
  source 1..18: mol_type = other RNA; note = Antisense oligonucleotide
  modified_base 1: mod_base = OTHER; note = thymine; note = backbone modification: 5'-phosphorothioate; note = sugar modification: 2'-O-methoxyethylribose
  modified_base 2: mod_base = OTHER; note = sugar modification: 2'-O-methoxyethylribose; note = backbone modification: 5'-phosphorothioate
  modified_base 3: mod_base = OTHER; note = thymine; note = sugar modification: 2'-O-methoxyethylribose; note = backbone modification: 5'-phosphorothioate
  modified_base 4: mod_base = OTHER; note = backbone modification: 5'-phosphorothioate; note = sugar modification: 2-fluororibose; note = thymine
  modified_base 5: mod_base = OTHER; mod_base = m5c; note = backbone modification: 5'-phosphorothioate; note = sugar modification: 2-fluororibose
  modified_base 6: mod_base = OTHER; note = sugar modification: 2-fluororibose; note = backbone modification: 5'-phosphorothioate; note = thymine
  modified_base 7: mod_base = OTHER; note = thymine; note = sugar modification: 2-fluororibose; note = backbone modification: 5'-phosphorothioate
  modified_base 8: mod_base = OTHER; note = sugar modification: 2-fluororibose; note = backbone modification: 5'-phosphorothioate
  modified_base 9: mod_base = OTHER; note = backbone modification: 5'-phosphorothioate; note = sugar modification: 2-fluororibose; note = thymine
  modified_base 10: mod_base = OTHER; note = backbone modification: 5'-phosphorothioate; note = sugar modification: 2-fluororibose
  modified_base 11: mod_base = OTHER; mod_base = m5c; note = backbone modification: 5'-phosphorothioate; note = sugar modification: 2-fluororibose
  modified_base 12: mod_base = OTHER; note = backbone modification: 5'-phosphorothioate; note = sugar modification: 2-fluororibose; note = thymine
  modified_base 13: mod_base = OTHER; note = thymine; note = sugar modification: 2-fluororibose; note = backbone modification: 5'-phosphorothioate
  modified_base 14: mod_base = OTHER; mod_base = m5c; note = sugar modification: 2-fluororibose; note = backbone modification: 5'-phosphorothioate
  modified_base 15: mod_base = OTHER; note = backbone modification: 5'-phosphorothioate; note = sugar modification: 2-fluororibose
  modified_base 16: mod_base = OTHER; note = backbone modification: 5'-phosphorothioate; note = thymine; note = sugar modification: 2'-O-methoxyethylribose
  modified_base 17: mod_base = m5c; mod_base = OTHER; note = backbone modification: 5'-phosphorothioate; note = sugar modification: 2'-O-methoxyethylribose
  modified_base 18: mod_base = m5c; mod_base = OTHER; note = sugar modification: 2'-O-methoxyethylribose
tgttcttgtacttcatcc

SEQ ID NO: 541 - RNA, 18 nt, synthetic construct
  source 1..18: mol_type = other RNA; note = Antisense oligonucleotide
  modified_base 1: mod_base = m5c; mod_base = OTHER; note = backbone modification: 5'-phosphorothioate; note = sugar modification: 2'-O-methoxyethylribose
  modified_base 2: mod_base = m5c; mod_base = OTHER; note = backbone modification: 5'-phosphorothioate; note = sugar modification: 2'-O-methoxyethylribose
  modified_base 3: mod_base = OTHER; note = sugar modification: 2'-O-methoxyethylribose; note = backbone modification: 5'-phosphorothioate
  modified_base 4: mod_base = OTHER; note = sugar modification: 2'-O-methoxyethylribose; note = thymine; note = backbone modification: 5'-phosphorothioate
  modified_base 5: mod_base = OTHER; note = backbone modification: 5'-phosphorothioate; note = sugar modification: 2'-O-methoxyethylribose
  modified_base 6: mod_base = OTHER; note = backbone modification: 5'-phosphorothioate; note = sugar modification: 2'-O-methoxyethylribose
  modified_base 7: mod_base = m5c; mod_base = OTHER; note = sugar modification: 2'-O-methoxyethylribose; note = backbone modification: 5'-phosphorothioate
  modified_base 8: mod_base = OTHER; note = sugar modification: 2'-O-methoxyethylribose; note = backbone modification: 5'-phosphorothioate; note = thymine
  modified_base 9: mod_base = m5c; mod_base = OTHER; note = sugar modification: 2'-O-methoxyethylribose; note = backbone modification: 5'-phosphorothioate
  modified_base 10: mod_base = OTHER; note = backbone modification: 5'-phosphorothioate; note = sugar modification: 2'-O-methoxyethylribose
  modified_base 11: mod_base = OTHER; note = backbone modification: 5'-phosphorothioate; note = sugar modification: 2'-O-methoxyethylribose
  modified_base 12: mod_base = OTHER; note = sugar modification: 2'-O-methoxyethylribose; note = backbone modification: 5'-phosphorothioate
  modified_base 13: mod_base = m5c; mod_base = OTHER; note = backbone modification: 5'-phosphorothioate; note = sugar modification: 2'-O-methoxyethylribose
  modified_base 14: mod_base = OTHER; note = backbone modification: 5'-phosphorothioate; note = thymine; note = sugar modification: 2'-O-methoxyethylribose
  modified_base 15: mod_base = OTHER; note = sugar modification: 2'-O-methoxyethylribose; note = thymine; note = backbone modification: 5'-phosphorothioate
  modified_base 16: mod_base = OTHER; note = sugar modification: 2'-O-methoxyethylribose; note = backbone modification: 5'-phosphorothioate
  modified_base 17: mod_base = OTHER; note = backbone modification: 5'-phosphorothioate; note = sugar modification: 2'-O-methoxyethylribose
  modified_base 18: mod_base = m5c; mod_base = OTHER; note = sugar modification: 2'-O-methoxyethylribose
ccatgactcaagcttggc

SEQ ID NO: 542 - RNA, 18 nt, synthetic construct
  source 1..18: mol_type = other RNA; note = Antisense oligonucleotide
  modified_base 1: mod_base = OTHER; note = sugar modification: 2'-O-methoxyethylribose; note = backbone modification: 5'-phosphorothioate; note = thymine
  modified_base 2: mod_base = m5c; mod_base = OTHER; note = sugar modification: 2'-O-methoxyethylribose; note = backbone modification: 5'-phosphorothioate
  modified_base 3: mod_base = OTHER; mod_base = m5c; note = backbone modification: 5'-phosphorothioate; note = sugar modification: 2'-O-methoxyethylribose
  modified_base 4: mod_base = OTHER; note = backbone modification: 5'-phosphorothioate; note = sugar modification: 2'-O-methoxyethylribose
  modified_base 5: mod_base = OTHER; note = sugar modification: 2'-O-methoxyethylribose; note = thymine; note = backbone modification: 5'-phosphorothioate
  modified_base 6: mod_base = OTHER; note = backbone modification: 5'-phosphorothioate; note = sugar modification: 2'-O-methoxyethylribose
  modified_base 7: mod_base = OTHER; note = backbone modification: 5'-phosphorothioate; note = sugar modification: 2'-O-methoxyethylribose
  modified_base 8: mod_base = OTHER; mod_base = m5c; note = sugar modification: 2'-O-methoxyethylribose; note = backbone modification: 5'-phosphorothioate
  modified_base 9: mod_base = OTHER; note = thymine; note = sugar modification: 2'-O-methoxyethylribose; note = backbone modification: 5'-phosphorothioate
  modified_base 10: mod_base = m5c; mod_base = OTHER; note = sugar modification: 2'-O-methoxyethylribose; note = backbone modification: 5'-phosphorothioate
  modified_base 11: mod_base = OTHER; note = sugar modification: 2'-O-methoxyethylribose; note = backbone modification: 5'-phosphorothioate
  modified_base 12: mod_base = OTHER; note = backbone modification: 5'-phosphorothioate; note = sugar modification: 2'-O-methoxyethylribose
  modified_base 13: mod_base = OTHER; note = sugar modification: 2'-O-methoxyethylribose; note = backbone modification: 5'-phosphorothioate
  modified_base 14: mod_base = m5c; mod_base = OTHER; note = sugar modification: 2'-O-methoxyethylribose; note = backbone modification: 5'-phosphorothioate
  modified_base 15: mod_base = OTHER; note = backbone modification: 5'-phosphorothioate; note = sugar modification: 2'-O-methoxyethylribose; note = thymine
  modified_base 16: mod_base = OTHER; note = sugar modification: 2'-O-methoxyethylribose; note = backbone modification: 5'-phosphorothioate; note = thymine
  modified_base 17: mod_base = OTHER; note = sugar modification: 2'-O-methoxyethylribose; note = backbone modification: 5'-phosphorothioate
  modified_base 18: mod_base = OTHER; note = sugar modification: 2'-O-methoxyethylribose
tccatgactcaagcttgg

SEQ ID NO: 543 - RNA, 18 nt, synthetic construct
  source 1..18: mol_type = other RNA; note = Antisense oligonucleotide
  modified_base 1: mod_base = OTHER; note = sugar modification: 2'-O-methoxyethylribose; note = thymine; note = backbone modification: 5'-phosphorothioate
  modified_base 2: mod_base = OTHER; note = sugar modification: 2'-O-methoxyethylribose; note = thymine; note = backbone modification: 5'-phosphorothioate
  modified_base 3: mod_base = OTHER; mod_base = m5c; note = sugar modification: 2'-O-methoxyethylribose; note = backbone modification: 5'-phosphorothioate
  modified_base 4: mod_base = m5c; mod_base = OTHER; note = sugar modification: 2'-O-methoxyethylribose; note = backbone modification: 5'-phosphorothioate
  modified_base 5: mod_base = OTHER; note = sugar modification: 2'-O-methoxyethylribose; note = backbone modification: 5'-phosphorothioate
  modified_base 6: mod_base = OTHER; note = thymine; note = backbone modification: 5'-phosphorothioate; note = sugar modification: 2'-O-methoxyethylribose
  modified_base 7: mod_base = OTHER; note = backbone modification: 5'-phosphorothioate; note = sugar modification: 2'-O-methoxyethylribose
  modified_base 8: mod_base = OTHER; note = backbone modification: 5'-phosphorothioate; note = sugar modification: 2'-O-methoxyethylribose
  modified_base 9: mod_base = OTHER; mod_base = m5c; note = sugar modification: 2'-O-methoxyethylribose; note = backbone modification: 5'-phosphorothioate
  modified_base 10: mod_base = OTHER; note = thymine; note = backbone modification: 5'-phosphorothioate; note = sugar modification: 2'-O-methoxyethylribose
  modified_base 11: mod_base = m5c; mod_base = OTHER; note = sugar modification: 2'-O-methoxyethylribose; note = backbone modification: 5'-phosphorothioate
  modified_base 12: mod_base = OTHER; note = backbone modification: 5'-phosphorothioate; note = sugar modification: 2'-O-methoxyethylribose
  modified_base 13: mod_base = OTHER; note = sugar modification: 2'-O-methoxyethylribose; note = backbone modification: 5'-phosphorothioate
  modified_base 14: mod_base = OTHER; note = sugar modification: 2'-O-methoxyethylribose; note = backbone modification: 5'-phosphorothioate
  modified_base 15: mod_base = m5c; mod_base = OTHER; note = backbone modification: 5'-phosphorothioate; note = sugar modification: 2'-O-methoxyethylribose
  modified_base 16: mod_base = OTHER; note = backbone modification: 5'-phosphorothioate; note = thymine; note = sugar modification: 2'-O-methoxyethylribose
  modified_base 17: mod_base = OTHER; note = backbone modification: 5'-phosphorothioate; note = thymine; note = sugar modification: 2'-O-methoxyethylribose
  modified_base 18: mod_base = OTHER; note = sugar modification: 2'-O-methoxyethylribose
ttccatgactcaagcttg

SEQ ID NO: 544 - RNA, 18 nt, synthetic construct
  source 1..18: mol_type = other RNA; note = Antisense oligonucleotide
  modified_base 1: mod_base = OTHER; mod_base = m5c; note = backbone modification: 5'-phosphorothioate; note = sugar modification: 2'-O-methoxyethylribose
  modified_base 2: mod_base = OTHER; note = sugar modification: 2'-O-methoxyethylribose; note = backbone modification: 5'-phosphorothioate; note = thymine
  modified_base 3: mod_base = OTHER; note = thymine; note = backbone modification: 5'-phosphorothioate; note = sugar modification: 2'-O-methoxyethylribose
  modified_base 4: mod_base = m5c; mod_base = OTHER; note = sugar modification: 2'-O-methoxyethylribose; note = backbone modification: 5'-phosphorothioate
  modified_base 5: mod_base = OTHER; mod_base = m5c; note = backbone modification: 5'-phosphorothioate; note = sugar modification: 2'-O-methoxyethylribose
  modified_base 6: mod_base = OTHER; note = backbone modification: 5'-phosphorothioate; note = sugar modification: 2'-O-methoxyethylribose
  modified_base 7: mod_base = OTHER; note = thymine; note = backbone modification: 5'-phosphorothioate; note = sugar modification: 2'-O-methoxyethylribose
  modified_base 8: mod_base = OTHER; note = backbone modification: 5'-phosphorothioate; note = sugar modification: 2'-O-methoxyethylribose
  modified_base 9: mod_base = OTHER; note = sugar modification: 2'-O-methoxyethylribose; note = backbone modification: 5'-phosphorothioate
  modified_base 10: mod_base = m5c; mod_base = OTHER; note = sugar modification: 2'-O-methoxyethylribose; note = backbone modification: 5'-phosphorothioate
  modified_base 11: mod_base = OTHER; note = thymine; note = sugar modification: 2'-O-methoxyethylribose; note = backbone modification: 5'-phosphorothioate
  modified_base 12: mod_base = OTHER; mod_base = m5c; note = backbone modification: 5'-phosphorothioate; note = sugar modification: 2'-O-methoxyethylribose
  modified_base 13: mod_base = OTHER; note = sugar modification: 2'-O-methoxyethylribose; note = backbone modification: 5'-phosphorothioate
  modified_base 14: mod_base = OTHER; note = backbone modification: 5'-phosphorothioate; note = sugar modification: 2'-O-methoxyethylribose
  modified_base 15: mod_base = OTHER; note = backbone modification: 5'-phosphorothioate; note = sugar modification: 2'-O-methoxyethylribose
  modified_base 16: mod_base = m5c; mod_base = OTHER; note = backbone modification: 5'-phosphorothioate; note = sugar modification: 2'-O-methoxyethylribose
  modified_base 17: mod_base = OTHER; note = thymine; note = backbone modification: 5'-phosphorothioate; note = sugar modification: 2'-O-methoxyethylribose
  modified_base 18: mod_base = OTHER; note = sugar modification: 2'-O-methoxyethylribose; note = thymine
cttccatgactcaagctt

SEQ ID NO: 545 - RNA, 18 nt, synthetic construct
  source 1..18: mol_type = other RNA; note = Antisense oligonucleotide
  modified_base 1: mod_base = OTHER; note = sugar modification: 2'-O-methoxyethylribose; note = thymine; note = backbone modification: 5'-phosphorothioate
  modified_base 2: mod_base = OTHER; mod_base = m5c; note = backbone modification: 5'-phosphorothioate; note = sugar modification: 2'-O-methoxyethylribose
  modified_base 3: mod_base = OTHER; mod_base = m5c; note = backbone modification: 5'-phosphorothioate; note = sugar modification: 2'-O-methoxyethylribose
  modified_base 4: mod_base = OTHER; note = backbone modification: 5'-phosphorothioate; note = thymine; note = sugar modification: 2'-O-methoxyethylribose
  modified_base 5: mod_base = OTHER; note = thymine; note = backbone modification: 5'-phosphorothioate; note = sugar modification: 2'-O-methoxyethylribose
  modified_base 6: mod_base = m5c; mod_base = OTHER; note = backbone modification: 5'-phosphorothioate; note = sugar modification: 2'-O-methoxyethylribose
  modified_base 7: mod_base = m5c; mod_base = OTHER; note = backbone modification: 5'-phosphorothioate; note = sugar modification: 2'-O-methoxyethylribose
  modified_base 8: mod_base = OTHER; note = sugar modification: 2'-O-methoxyethylribose; note = backbone modification: 5'-phosphorothioate
  modified_base 9: mod_base = OTHER; note = backbone modification: 5'-phosphorothioate; note = thymine; note = sugar modification: 2'-O-methoxyethylribose
  modified_base 10: mod_base = OTHER; note = sugar modification: 2'-O-methoxyethylribose; note = backbone modification: 5'-phosphorothioate
  modified_base 11: mod_base = OTHER; note = sugar modification: 2'-O-methoxyethylribose; note = backbone modification: 5'-phosphorothioate
  modified_base 12: mod_base = OTHER; mod_base = m5c; note = backbone modification: 5'-phosphorothioate; note = sugar modification: 2'-O-methoxyethylribose
  modified_base 13: mod_base = OTHER; note = thymine; note = sugar modification: 2'-O-methoxyethylribose; note = backbone modification: 5'-phosphorothioate
  modified_base 14: mod_base = OTHER; mod_base = m5c; note = backbone modification: 5'-phosphorothioate; note = sugar modification: 2'-O-methoxyethylribose
  modified_base 15: mod_base = OTHER; note = sugar modification: 2'-O-methoxyethylribose; note = backbone modification: 5'-phosphorothioate
  modified_base 16: mod_base = OTHER; note = backbone modification: 5'-phosphorothioate; note = sugar modification: 2'-O-methoxyethylribose
  modified_base 17: mod_base = OTHER; note = sugar modification: 2'-O-methoxyethylribose; note = backbone modification: 5'-phosphorothioate
  modified_base 18: mod_base = OTHER; mod_base = m5c; note = sugar modification: 2'-O-methoxyethylribose
tccttccatgactcaagc

SEQ ID NO: 546 - RNA, 18 nt, synthetic construct
  source 1..18: mol_type = other RNA; note = Antisense oligonucleotide
  modified_base 1: mod_base = m5c; mod_base = OTHER; note = backbone modification: 5'-phosphorothioate; note = sugar modification: 2'-O-methoxyethylribose
  modified_base 2: mod_base = OTHER; note = backbone modification: 5'-phosphorothioate; note = thymine; note = sugar modification: 2'-O-methoxyethylribose
  modified_base 3: mod_base = OTHER; mod_base = m5c; note = sugar modification: 2'-O-methoxyethylribose; note = backbone modification: 5'-phosphorothioate
  modified_base 4: mod_base = m5c; mod_base = OTHER; note = backbone modification: 5'-phosphorothioate; note = sugar modification: 2'-O-methoxyethylribose
  modified_base 5: mod_base = OTHER; note = sugar modification: 2'-O-methoxyethylribose; note = backbone modification: 5'-phosphorothioate; note = thymine
  modified_base 6: mod_base = OTHER; note = sugar modification: 2'-O-methoxyethylribose; note = backbone modification: 5'-phosphorothioate; note = thymine
  modified_base 7: mod_base = m5c; mod_base = OTHER; note = sugar modification: 2'-O-methoxyethylribose; note = backbone modification: 5'-phosphorothioate
  modified_base 8: mod_base = m5c; mod_base = OTHER; note = sugar modification: 2'-O-methoxyethylribose; note = backbone modification: 5'-phosphorothioate
  modified_base 9: mod_base = OTHER; note = backbone modification: 5'-phosphorothioate; note = sugar modification: 2'-O-methoxyethylribose
  modified_base 10: mod_base = OTHER; note = sugar modification: 2'-O-methoxyethylribose; note = backbone modification: 5'-phosphorothioate; note = thymine
  modified_base 11: mod_base = OTHER; note = backbone modification: 5'-phosphorothioate; note = sugar modification: 2'-O-methoxyethylribose
  modified_base 12: mod_base = OTHER; note = sugar modification: 2'-O-methoxyethylribose; note = backbone modification: 5'-phosphorothioate
  modified_base 13: mod_base = OTHER; mod_base = m5c; note = backbone modification: 5'-phosphorothioate; note = sugar modification: 2'-O-methoxyethylribose
  modified_base 14: mod_base = OTHER; note = sugar modification: 2'-O-methoxyethylribose; note = thymine; note = backbone modification: 5'-phosphorothioate
  modified_base 15: mod_base = m5c; mod_base = OTHER; note = backbone modification: 5'-phosphorothioate; note = sugar modification: 2'-O-methoxyethylribose
  modified_base 16: mod_base = OTHER; note = backbone modification: 5'-phosphorothioate; note = sugar modification: 2'-O-methoxyethylribose
  modified_base 17: mod_base = OTHER; note = sugar modification: 2'-O-methoxyethylribose; note = backbone modification: 5'-phosphorothioate
  modified_base 18: mod_base = OTHER; note = sugar modification: 2'-O-methoxyethylribose
ctccttccatgactcaag

SEQ ID NO: 547 - RNA, 18 nt, synthetic construct
  source 1..18: mol_type = other RNA; note = Antisense oligonucleotide
  modified_base 1: mod_base = OTHER; mod_base = m5c; note = sugar modification: 2'-O-methoxyethylribose; note = backbone modification: 5'-phosphorothioate
  modified_base 2: mod_base = OTHER; mod_base = m5c; note = backbone modification: 5'-phosphorothioate; note = sugar modification: 2'-O-methoxyethylribose
  modified_base 3: mod_base = OTHER; note = thymine; note = sugar modification: 2'-O-methoxyethylribose; note = backbone modification: 5'-phosphorothioate
  modified_base 4: mod_base = OTHER; mod_base = m5c; note = backbone modification: 5'-phosphorothioate; note = sugar modification: 2'-O-methoxyethylribose
  modified_base 5: mod_base = OTHER; mod_base = m5c; note = backbone modification: 5'-phosphorothioate; note = sugar modification: 2'-O-methoxyethylribose
  modified_base 6: mod_base = OTHER; note = thymine; note = sugar modification: 2'-O-methoxyethylribose; note = backbone modification: 5'-phosphorothioate
  modified_base 7: mod_base = OTHER; note = sugar modification: 2'-O-methoxyethylribose; note = thymine; note = backbone modification: 5'-phosphorothioate
  modified_base 8: mod_base = OTHER; mod_base = m5c; note = backbone modification: 5'-phosphorothioate; note = sugar modification: 2'-O-methoxyethylribose
  modified_base 9: mod_base = m5c; mod_base = OTHER; note = backbone modification: 5'-phosphorothioate; note = sugar modification: 2'-O-methoxyethylribose
  modified_base 10: mod_base = OTHER; note = sugar modification: 2'-O-methoxyethylribose; note = backbone modification: 5'-phosphorothioate
  modified_base 11: mod_base = OTHER; note = sugar modification: 2'-O-methoxyethylribose; note = backbone modification: 5'-phosphorothioate; note = thymine
  modified_base 12: mod_base = OTHER; note = sugar modification: 2'-O-methoxyethylribose; note = backbone modification: 5'-phosphorothioate
  modified_base 13: mod_base = OTHER; note = backbone modification: 5'-phosphorothioate; note = sugar modification: 2'-O-methoxyethylribose
  modified_base 14: mod_base = OTHER; mod_base = m5c; note = sugar modification: 2'-O-methoxyethylribose; note = backbone modification: 5'-phosphorothioate
  modified_base 15: mod_base = OTHER; note = sugar modification: 2'-O-methoxyethylribose; note = thymine; note = backbone modification: 5'-phosphorothioate
  modified_base 16: mod_base = OTHER; mod_base = m5c; note = backbone modification: 5'-phosphorothioate; note = sugar modification: 2'-O-methoxyethylribose
  modified_base 17: mod_base = OTHER; note = backbone modification: 5'-phosphorothioate; note = sugar modification: 2'-O-methoxyethylribose
  modified_base 18: mod_base = OTHER; note = sugar modification: 2'-O-methoxyethylribose
cctccttccatgactcaa

SEQ ID NO: 548 - RNA, 18 nt, synthetic construct
  source 1..18: mol_type = other RNA; note = Antisense oligonucleotide
  modified_base 1: mod_base = OTHER; mod_base = m5c; note = sugar modification: 2'-O-methoxyethylribose; note = backbone modification: 5'-phosphorothioate
  modified_base 2: mod_base = OTHER; mod_base = m5c; note = backbone modification: 5'-phosphorothioate; note = sugar modification: 2'-O-methoxyethylribose
  modified_base 3: mod_base = m5c; mod_base = OTHER; note = sugar modification: 2'-O-methoxyethylribose; note = backbone modification: 5'-phosphorothioate
  modified_base 4: mod_base = OTHER; note = backbone modification: 5'-phosphorothioate; note = sugar modification: 2'-O-methoxyethylribose; note = thymine
  modified_base 5: mod_base = m5c; mod_base = OTHER; note = backbone modification: 5'-phosphorothioate; note = sugar modification: 2'-O-methoxyethylribose
  modified_base 6: mod_base = OTHER; mod_base = m5c; note = backbone modification: 5'-phosphorothioate; note = sugar modification: 2'-O-methoxyethylribose
  modified_base 7: mod_base = OTHER; note = backbone modification: 5'-phosphorothioate; note = sugar modification: 2'-O-methoxyethylribose; note = thymine
  modified_base 8: mod_base = OTHER; note = sugar modification: 2'-O-methoxyethylribose; note = thymine; note = backbone modification: 5'-phosphorothioate
  modified_base 9: mod_base = OTHER; mod_base = m5c; note = backbone modification: 5'-phosphorothioate; note = sugar modification: 2'-O-methoxyethylribose
  modified_base 10: mod_base = m5c; mod_base = OTHER; note = sugar modification: 2'-O-methoxyethylribose; note = backbone modification: 5'-phosphorothioate
  modified_base 11: mod_base = OTHER; note = backbone modification: 5'-phosphorothioate; note = sugar modification: 2'-O-methoxyethylribose
  modified_base 12: mod_base = OTHER; note = sugar modification: 2'-O-methoxyethylribose; note = thymine; note = backbone modification: 5'-phosphorothioate
  modified_base 13: mod_base = OTHER; note = sugar modification: 2'-O-methoxyethylribose; note = backbone modification: 5'-phosphorothioate
  modified_base 14: mod_base = OTHER; note = backbone modification: 5'-phosphorothioate; note = sugar modification: 2'-O-methoxyethylribose
  modified_base 15: mod_base = m5c; mod_base = OTHER; note = backbone modification: 5'-phosphorothioate; note = sugar modification: 2'-O-methoxyethylribose
  modified_base 16: mod_base = OTHER; note = backbone modification: 5'-phosphorothioate; note = sugar modification: 2'-O-methoxyethylribose; note = thymine
  modified_base 17: mod_base = OTHER; mod_base = m5c; note = sugar modification: 2'-O-methoxyethylribose; note = backbone modification: 5'-phosphorothioate
  modified_base 18: mod_base = OTHER; note = sugar modification: 2'-O-methoxyethylribose
ccctccttccatgactca

SEQ ID NO: 549 - RNA, 18 nt, synthetic construct
  source 1..18: mol_type = other RNA; note = Antisense oligonucleotide
  modified_base 1: mod_base = OTHER; note = backbone modification: 5'-phosphorothioate; note = sugar modification: 2'-O-methoxyethylribose
  modified_base 2: mod_base = OTHER; note = backbone modification: 5'-phosphorothioate; note = sugar modification: 2'-O-methoxyethylribose
  modified_base 3: mod_base = OTHER; mod_base = m5c; note = backbone modification: 5'-phosphorothioate; note = sugar modification: 2'-O-methoxyethylribose
  modified_base 4: mod_base = OTHER; mod_base = m5c; note = backbone modification: 5'-phosphorothioate; note = sugar modification: 2'-O-methoxyethylribose
  modified_base 5: mod_base = m5c; mod_base = OTHER; note = backbone modification: 5'-phosphorothioate; note = sugar modification: 2'-O-methoxyethylribose
  modified_base 6: mod_base = OTHER; note = thymine; note = sugar modification: 2'-O-methoxyethylribose; note = backbone modification: 5'-phosphorothioate
  modified_base 7: mod_base = OTHER; mod_base = m5c; note = backbone modification: 5'-phosphorothioate; note = sugar modification: 2'-O-methoxyethylribose
  modified_base 8: mod_base = m5c; mod_base = OTHER; note = sugar modification: 2'-O-methoxyethylribose; note = backbone modification: 5'-phosphorothioate
  modified_base 9: mod_base = OTHER; note = thymine; note = backbone modification: 5'-phosphorothioate; note = sugar modification: 2'-O-methoxyethylribose
  modified_base 10: mod_base = OTHER; note = thymine; note = backbone modification: 5'-phosphorothioate; note = sugar modification: 2'-O-methoxyethylribose
  modified_base 11: mod_base = m5c; mod_base = OTHER; note = sugar modification: 2'-O-methoxyethylribose; note = backbone modification: 5'-phosphorothioate
  modified_base 12: mod_base = OTHER; mod_base = m5c; note = backbone modification: 5'-phosphorothioate; note = sugar modification: 2'-O-methoxyethylribose
  modified_base 13: mod_base = OTHER; note = sugar modification: 2'-O-methoxyethylribose; note = backbone modification: 5'-phosphorothioate
  modified_base 14: mod_base = OTHER; note = backbone modification: 5'-phosphorothioate; note = sugar modification: 2'-O-methoxyethylribose; note = thymine
  modified_base 15: mod_base = OTHER; note = sugar modification: 2'-O-methoxyethylribose; note = backbone modification: 5'-phosphorothioate
  modified_base 16: mod_base = OTHER; note = sugar modification: 2'-O-methoxyethylribose; note = backbone modification: 5'-phosphorothioate
  modified_base 17: mod_base = m5c; mod_base = OTHER; note = sugar modification: 2'-O-methoxyethylribose; note = backbone modification: 5'-phosphorothioate
  modified_base 18: mod_base = OTHER; note = sugar modification: 2'-O-methoxyethylribose; note = thymine
gaccctccttccatgact

SEQ ID NO: 550 - RNA, 18 nt, synthetic construct
  source 1..18: mol_type = other RNA; note = Antisense oligonucleotide
  modified_base 1: mod_base = OTHER; note = backbone modification: 5'-phosphorothioate; note = sugar modification: 2'-O-methoxyethylribose
  modified_base 2: mod_base = OTHER; note = sugar modification: 2'-O-methoxyethylribose; note = backbone modification: 5'-phosphorothioate
  modified_base 3: mod_base = OTHER; note = sugar modification: 2'-O-methoxyethylribose; note = backbone modification: 5'-phosphorothioate
  modified_base 4: mod_base = m5c; mod_base = OTHER; note = backbone modification: 5'-phosphorothioate; note = sugar modification: 2'-O-methoxyethylribose
  modified_base 5: mod_base = m5c; mod_base = OTHER; note = sugar modification: 2'-O-methoxyethylribose; note = backbone modification: 5'-phosphorothioate
  modified_base 6: mod_base = m5c; mod_base = OTHER; note = backbone modification: 5'-phosphorothioate; note = sugar modification: 2'-O-methoxyethylribose
  modified_base 7: mod_base = OTHER; note = backbone modification: 5'-phosphorothioate; note = sugar modification: 2'-O-methoxyethylribose; note = thymine
  modified_base 8: mod_base = m5c; mod_base = OTHER; note = sugar modification: 2'-O-methoxyethylribose; note = backbone modification: 5'-phosphorothioate
  modified_base 9: mod_base = m5c; mod_base = OTHER; note = backbone modification: 5'-phosphorothioate; note = sugar modification: 2'-O-methoxyethylribose
  modified_base 10: mod_base = OTHER; note = thymine; note = sugar modification: 2'-O-methoxyethylribose; note = backbone modification: 5'-phosphorothioate
  modified_base 11: mod_base = OTHER; note = thymine; note = backbone modification: 5'-phosphorothioate; note = sugar modification: 2'-O-methoxyethylribose
  modified_base 12: mod_base = OTHER; mod_base = m5c; note = sugar modification: 2'-O-methoxyethylribose; note = backbone modification: 5'-phosphorothioate
  modified_base 13: mod_base = m5c; mod_base = OTHER; note = backbone modification: 5'-phosphorothioate; note = sugar modification: 2'-O-methoxyethylribose
  modified_base 14: mod_base = OTHER; note = backbone modification: 5'-phosphorothioate; note = sugar modification: 2'-O-methoxyethylribose
  modified_base 15: mod_base = OTHER; note = thymine; note = backbone modification: 5'-phosphorothioate; note = sugar modification: 2'-O-methoxyethylribose
  modified_base 16: mod_base = OTHER; note = backbone modification: 5'-phosphorothioate; note = sugar modification: 2'-O-methoxyethylribose
  modified_base 17: mod_base = OTHER; note = backbone modification: 5'-phosphorothioate; note = sugar modification: 2'-O-methoxyethylribose
  modified_base 18: mod_base = OTHER; mod_base = m5c; note = sugar modification: 2'-O-methoxyethylribose
ggaccctccttccatgac

SEQ ID NO: 551 - RNA, 18 nt, synthetic construct
  source 1..18: mol_type = other RNA; note = Antisense oligonucleotide
  modified_base 1: mod_base = OTHER; note = sugar modification: 2'-O-methoxyethylribose; note = backbone modification: 5'-phosphorothioate
  modified_base 2: mod_base = OTHER; note = backbone modification: 5'-phosphorothioate; note = sugar modification: 2'-O-methoxyethylribose
  modified_base 3: mod_base = OTHER; note = backbone modification: 5'-phosphorothioate; note = sugar modification: 2'-O-methoxyethylribose
  modified_base 4: mod_base = OTHER; note = backbone modification: 5'-phosphorothioate; note = sugar modification: 2'-O-methoxyethylribose
  modified_base 5: mod_base = m5c; mod_base = OTHER; note = sugar modification: 2'-O-methoxyethylribose; note = backbone modification: 5'-phosphorothioate
  modified_base 6: mod_base = m5c; mod_base = OTHER; note = backbone modification: 5'-phosphorothioate; note = sugar modification: 2'-O-methoxyethylribose
  modified_base 7: mod_base = m5c; mod_base = OTHER; note = sugar modification: 2'-O-methoxyethylribose; note = backbone modification: 5'-phosphorothioate
  modified_base 8: mod_base = OTHER; note = sugar modification: 2'-O-methoxyethylribose; note = backbone modification: 5'-phosphorothioate; note = thymine
  modified_base 9: mod_base = m5c; mod_base = OTHER; note = sugar modification: 2'-O-methoxyethylribose; note = backbone modification: 5'-phosphorothioate
  modified_base 10: mod_base = m5c; mod_base = OTHER; note = backbone modification: 5'-phosphorothioate; note = sugar modification: 2'-O-methoxyethylribose
  modified_base 11: mod_base = OTHER; note = thymine; note = backbone modification: 5'-phosphorothioate; note = sugar modification: 2'-O-methoxyethylribose
  modified_base 12: mod_base = OTHER; note = backbone modification: 5'-phosphorothioate; note = sugar modification: 2'-O-methoxyethylribose; note = thymine
  modified_base 13: mod_base = m5c; mod_base = OTHER; note = backbone modification: 5'-phosphorothioate; note = sugar modification: 2'-O-methoxyethylribose
  modified_base 14: mod_base = m5c; mod_base = OTHER; note = backbone modification: 5'-phosphorothioate; note = sugar modification: 2'-O-methoxyethylribose
  modified_base 15: mod_base = OTHER; note = backbone modification: 5'-phosphorothioate; note = sugar modification: 2'-O-methoxyethylribose
  modified_base 16: mod_base = OTHER; note = sugar modification: 2'-O-methoxyethylribose; note = thymine; note = backbone modification: 5'-phosphorothioate
  modified_base 17: mod_base = OTHER; note = sugar modification: 2'-O-methoxyethylribose; note = backbone modification: 5'-phosphorothioate
  modified_base 18: mod_base = OTHER; note = sugar modification: 2'-O-methoxyethylribose
gggaccctccttccatga

SEQ ID NO: 552 - RNA, 18 nt, synthetic construct
  source 1..18: mol_type = other RNA; note = Antisense oligonucleotide
  modified_base 1: mod_base = OTHER; note = sugar modification: 2'-O-methoxyethylribose; note = backbone modification: 5'-phosphorothioate
  modified_base 2: mod_base = OTHER; note = sugar modification: 2'-O-methoxyethylribose; note = backbone modification: 5'-phosphorothioate
  modified_base 3: mod_base = OTHER; note = sugar modification: 2'-O-methoxyethylribose; note = backbone modification: 5'-phosphorothioate
  modified_base 4: mod_base = OTHER; note = backbone modification: 5'-phosphorothioate; note = sugar modification: 2'-O-methoxyethylribose
  modified_base 5: mod_base = OTHER; note = backbone modification: 5'-phosphorothioate; note = sugar modification: 2'-O-methoxyethylribose
  modified_base 6: mod_base = OTHER; mod_base = m5c; note = backbone modification: 5'-phosphorothioate; note = sugar modification: 2'-O-methoxyethylribose
  modified_base 7: mod_base = OTHER; mod_base = m5c; note = backbone modification: 5'-phosphorothioate; note = sugar modification: 2'-O-methoxyethylribose
  modified_base 8: mod_base = m5c; mod_base = OTHER; note = sugar modification: 2'-O-methoxyethylribose; note = backbone modification: 5'-phosphorothioate
  modified_base 9: mod_base = OTHER; note = thymine; note = sugar modification: 2'-O-methoxyethylribose; note = backbone modification: 5'-phosphorothioate
  modified_base 10: mod_base = m5c; mod_base = OTHER; note = sugar modification: 2'-O-methoxyethylribose; note = backbone modification: 5'-phosphorothioate
  modified_base 11: mod_base = OTHER; mod_base = m5c; note = sugar modification: 2'-O-methoxyethylribose; note = backbone modification: 5'-phosphorothioate
  modified_base 12: mod_base = OTHER; note = sugar modification: 2'-O-methoxyethylribose; note = backbone modification: 5'-phosphorothioate; note = thymine
  modified_base 13: mod_base = OTHER; note = thymine; note = backbone modification: 5'-phosphorothioate; note = sugar modification: 2'-O-methoxyethylribose
  modified_base 14: mod_base = m5c; mod_base = OTHER; note = backbone modification: 5'-phosphorothioate; note = sugar modification: 2'-O-methoxyethylribose
  modified_base 15: mod_base = OTHER; mod_base = m5c; note = backbone modification: 5'-phosphorothioate; note = sugar modification: 2'-O-methoxyethylribose
  modified_base 16: mod_base = OTHER; note = backbone modification: 5'-phosphorothioate; note = sugar modification: 2'-O-methoxyethylribose
  modified_base 17: mod_base = OTHER; note = backbone modification: 5'-phosphorothioate; note = thymine; note = sugar modification: 2'-O-methoxyethylribose
  modified_base 18: mod_base = OTHER; note = sugar modification: 2'-O-methoxyethylribose
agggaccctccttccatg

SEQ ID NO: 553 - RNA, 18 nt, synthetic construct
  source 1..18: mol_type = other RNA; note = Antisense oligonucleotide
  modified_base 1: mod_base = OTHER; note = backbone modification: 5'-phosphorothioate; note = sugar modification: lna; note = thymine
  modified_base 2: mod_base = OTHER; note = backbone modification: 5'-phosphorothioate; note = sugar modification: 2'-O-methoxyethylribose
  modified_base 3: mod_base = OTHER; note = sugar modification: 2'-O-methoxyethylribose; note = backbone modification: 5'-phosphorothioate; note = thymine
  modified_base 4: mod_base = OTHER; note = backbone modification: 5'-phosphorothioate; note = thymine; note = sugar modification: 2'-O-methoxyethylribose
  modified_base 5: mod_base = m5c; mod_base = OTHER; note = backbone modification: 5'-phosphorothioate; note = sugar modification: 2'-O-methoxyethylribose
  modified_base 6: mod_base = OTHER; note = backbone modification: 5'-phosphorothioate; note = thymine; note = sugar modification: 2'-O-methoxyethylribose
  modified_base 7: mod_base = OTHER; note = thymine; note = sugar modification: 2'-O-methoxyethylribose; note = backbone modification: 5'-phosphorothioate
  modified_base 8: mod_base = OTHER; note = backbone modification: 5'-phosphorothioate; note = sugar modification: 2'-O-methoxyethylribose
  modified_base 9: mod_base = OTHER; note = sugar modification: 2'-O-methoxyethylribose; note = backbone modification: 5'-phosphorothioate; note = thymine
  modified_base 10: mod_base = OTHER; note = backbone modification: 5'-phosphorothioate; note = sugar modification: 2'-O-methoxyethylribose
  modified_base 11: mod_base = m5c; mod_base = OTHER; note = backbone modification: 5'-phosphorothioate; note = sugar modification: 2'-O-methoxyethylribose
  modified_base 12: mod_base = OTHER; note = backbone modification: 5'-phosphorothioate; note = thymine; note = sugar modification: 2'-O-methoxyethylribose
  modified_base 13: mod_base = OTHER; note = backbone modification: 5'-phosphorothioate; note = sugar modification: 2'-O-methoxyethylribose; note = thymine
  modified_base 14: mod_base = OTHER; mod_base = m5c; note = sugar modification: 2'-O-methoxyethylribose; note = backbone modification: 5'-phosphorothioate
  modified_base 15: mod_base = OTHER; note = backbone modification: 5'-phosphorothioate; note = sugar modification: 2'-O-methoxyethylribose
  modified_base 16: mod_base = OTHER; note = thymine; note = sugar modification: 2'-O-methoxyethylribose; note = backbone modification: 5'-phosphorothioate
  modified_base 17: mod_base = m5c; mod_base = OTHER; note = sugar modification: 2'-O-methoxyethylribose; note = backbone modification: 5'-phosphorothioate
  modified_base 18: mod_base = OTHER; mod_base = m5c; note = sugar modification: 2'-O-methoxyethylribose
tgttcttgtacttcatcc

SEQ ID NO: 554 - RNA, 18 nt, synthetic construct
  source 1..18: mol_type = other RNA; note = Antisense oligonucleotide
  modified_base 1: mod_base = OTHER; note = backbone modification: 5'-phosphorothioate; note = thymine; note = sugar modification: 2'-O-methoxyethylribose
  modified_base 2: mod_base = OTHER; note = backbone modification: 5'-phosphorothioate; note = sugar modification: lna
  modified_base 3: mod_base = OTHER; note = backbone modification: 5'-phosphorothioate; note = thymine; note = sugar modification: 2'-O-methoxyethylribose
  modified_base 4: mod_base = OTHER; note = thymine; note = backbone modification: 5'-phosphorothioate; note = sugar modification: 2'-O-methoxyethylribose
  modified_base 5: mod_base = OTHER; mod_base = m5c; note = sugar modification: 2'-O-methoxyethylribose; note = backbone modification: 5'-phosphorothioate
  modified_base 6: mod_base = OTHER; note = sugar modification: 2'-O-methoxyethylribose; note = thymine; note = backbone modification: 5'-phosphorothioate
  modified_base 7: mod_base = OTHER; note = backbone modification: 5'-phosphorothioate; note = thymine; note = sugar modification: 2'-O-methoxyethylribose
  modified_base 8: mod_base = OTHER; note = sugar modification: 2'-O-methoxyethylribose; note = backbone modification: 5'-phosphorothioate
  modified_base 9: mod_base = OTHER; note = sugar modification: 2'-O-methoxyethylribose; note = backbone modification: 5'-phosphorothioate; note = thymine
  modified_base 10: mod_base = OTHER; note = sugar modification: 2'-O-methoxyethylribose; note = backbone modification: 5'-phosphorothioate
  modified_base 11: mod_base = OTHER; mod_base = m5c; note = sugar modification: 2'-O-methoxyethylribose; note = backbone modification: 5'-phosphorothioate
  modified_base 12: mod_base = OTHER; note = thymine; note = backbone modification: 5'-phosphorothioate; note = sugar modification: 2'-O-methoxyethylribose
  modified_base 13: mod_base = OTHER; note = thymine; note = backbone modification: 5'-phosphorothioate; note = sugar modification: 2'-O-methoxyethylribose
  modified_base 14: mod_base = m5c; mod_base = OTHER; note = backbone modification: 5'-phosphorothioate; note = sugar modification: 2'-O-methoxyethylribose
  modified_base 15: mod_base = OTHER; note = backbone modification: 5'-phosphorothioate; note = sugar modification: 2'-O-methoxyethylribose
  modified_base 16: mod_base = OTHER; note = backbone modification: 5'-phosphorothioate; note = sugar modification: 2'-O-methoxyethylribose; note = thymine
  modified_base 17: mod_base = m5c; mod_base = OTHER; note = sugar modification: 2'-O-methoxyethylribose; note = backbone modification: 5'-phosphorothioate
  modified_base 18: mod_base = m5c; mod_base = OTHER; note = sugar modification: 2'-O-methoxyethylribose
tgttcttgtacttcatcc

SEQ ID NO: 555 - RNA, 18 nt, synthetic construct
  source 1..18: mol_type = other RNA; note = Antisense oligonucleotide
  modified_base 1: mod_base = OTHER; note = sugar modification: 2'-O-methoxyethylribose; note = thymine; note = backbone modification: 5'-phosphorothioate
  modified_base 2: mod_base = OTHER; note = sugar modification: 2'-O-methoxyethylribose; note = backbone modification: 5'-phosphorothioate
  modified_base 3: mod_base = OTHER; note = backbone modification: 5'-phosphorothioate; note = sugar modification: lna; note = thymine
  modified_base 4: mod_base = OTHER; note = thymine; note = backbone modification: 5'-phosphorothioate; note = sugar modification: 2'-O-methoxyethylribose
  modified_base 5: mod_base = OTHER; mod_base = m5c; note = backbone modification: 5'-phosphorothioate; note = sugar modification: 2'-O-methoxyethylribose
  modified_base 6: mod_base = OTHER; note = backbone modification: 5'-phosphorothioate; note = sugar modification: 2'-O-methoxyethylribose; note = thymine
  modified_base 7: mod_base = OTHER; note = sugar modification: 2'-O-methoxyethylribose; note = backbone modification: 5'-phosphorothioate; note = thymine
  modified_base 8: mod_base = OTHER; note = backbone modification: 5'-phosphorothioate; note = sugar modification: 2'-O-methoxyethylribose
  modified_base 9: mod_base = OTHER; note = backbone modification: 5'-phosphorothioate; note = thymine; note = sugar modification: 2'-O-methoxyethylribose
  modified_base 10: mod_base = OTHER; note = backbone modification: 5'-phosphorothioate; note = sugar modification: 2'-O-methoxyethylribose
  modified_base 11: mod_base = OTHER; mod_base = m5c; note = backbone modification: 5'-phosphorothioate; note = sugar modification: 2'-O-methoxyethylribose
  modified_base 12: mod_base = OTHER; note = thymine; note = backbone modification: 5'-phosphorothioate; note = sugar modification: 2'-O-methoxyethylribose
  modified_base 13: mod_base = OTHER; note = sugar modification: 2'-O-methoxyethylribose; note = thymine; note = backbone modification: 5'-phosphorothioate
  modified_base 14: mod_base = OTHER; mod_base = m5c; note = backbone modification: 5'-phosphorothioate; note = sugar modification: 2'-O-methoxyethylribose
  modified_base 15: mod_base = OTHER; note = backbone modification: 5'-phosphorothioate; note = sugar modification: 2'-O-methoxyethylribose
  modified_base 16: mod_base = OTHER; note = thymine; note = sugar modification: 2'-O-methoxyethylribose; note = backbone modification: 5'-phosphorothioate
  modified_base 17: mod_base = m5c; mod_base = OTHER; note = sugar modification: 2'-O-methoxyethylribose; note = backbone modification: 5'-phosphorothioate
  modified_base 18: mod_base = m5c; mod_base = OTHER; note = sugar modification: 2'-O-methoxyethylribose
tgttcttgtacttcatcc

SEQ ID NO: 556 - RNA, 18 nt, synthetic construct
  source 1..18: mol_type = other RNA; note = Antisense oligonucleotide
  modified_base 1: mod_base = OTHER; note = thymine; note = backbone modification: 5'-phosphorothioate; note = sugar modification: 2'-O-methoxyethylribose
  modified_base 2: mod_base = OTHER; note = sugar modification: 2'-O-methoxyethylribose; note = backbone modification: 5'-phosphorothioate
  modified_base 3: mod_base = OTHER; note = thymine; note = backbone modification: 5'-phosphorothioate; note = sugar modification: 2'-O-methoxyethylribose
  modified_base 4: mod_base = OTHER; note = thymine; note = backbone modification: 5'-phosphorothioate; note = sugar modification: lna
  modified_base 5: mod_base = OTHER; mod_base = m5c; note = sugar modification: 2'-O-methoxyethylribose; note = backbone modification: 5'-phosphorothioate
  modified_base 6: mod_base = OTHER; note = backbone modification: 5'-phosphorothioate; note = thymine; note = sugar modification: 2'-O-methoxyethylribose
  modified_base 7: mod_base = OTHER; note = thymine; note = sugar modification: 2'-O-methoxyethylribose; note = backbone modification: 5'-phosphorothioate
  modified_base 8: mod_base = OTHER; note = backbone modification: 5'-phosphorothioate; note = sugar modification: 2'-O-methoxyethylribose
  modified_base 9: mod_base = OTHER; note = backbone modification: 5'-phosphorothioate; note = sugar modification: 2'-O-methoxyethylribose; note = thymine
  modified_base 10: mod_base = OTHER; note = backbone modification: 5'-phosphorothioate; note = sugar modification: 2'-O-methoxyethylribose
  modified_base 11: mod_base = OTHER; mod_base = m5c; note = sugar modification: 2'-O-methoxyethylribose; note = backbone modification: 5'-phosphorothioate
  modified_base 12: mod_base = OTHER; note = sugar modification: 2'-O-methoxyethylribose; note = thymine; note = backbone modification: 5'-phosphorothioate
  modified_base 13: mod_base = OTHER; note = backbone modification: 5'-phosphorothioate; note = sugar modification: 2'-O-methoxyethylribose; note = thymine
  modified_base 14: mod_base = OTHER; mod_base = m5c; note = backbone modification: 5'-phosphorothioate; note = sugar modification: 2'-O-methoxyethylribose
  modified_base 15: mod_base = OTHER; note = backbone modification: 5'-phosphorothioate; note = sugar modification: 2'-O-methoxyethylribose
  modified_base 16: mod_base = OTHER; note = sugar modification: 2'-O-methoxyethylribose; note = thymine; note = backbone modification: 5'-phosphorothioate
  modified_base 17: mod_base = m5c; mod_base = OTHER; note = backbone modification: 5'-phosphorothioate; note = sugar modification: 2'-O-methoxyethylribose
  modified_base 18: mod_base = m5c; mod_base = OTHER; note = sugar modification: 2'-O-methoxyethylribose
tgttcttgtacttcatcc

SEQ ID NO: 557 - RNA, 18 nt, synthetic construct
  source 1..18: mol_type = other RNA; note = Antisense oligonucleotide
  modified_base 1: mod_base = OTHER; note = backbone modification: 5'-phosphorothioate; note = sugar modification: 2'-O-methoxyethylribose; note = thymine
  modified_base 2: mod_base = OTHER; note = backbone modification: 5'-phosphorothioate; note = sugar modification: 2'-O-methoxyethylribose
  modified_base 3: mod_base = OTHER; note = thymine; note = sugar modification: 2'-O-methoxyethylribose; note = backbone modification: 5'-phosphorothioate
  modified_base 4: mod_base = OTHER; note = thymine; note = sugar modification: 2'-O-methoxyethylribose; note = backbone modification: 5'-phosphorothioate
  modified_base 5: mod_base = OTHER; mod_base = m5c; note = sugar modification: lna; note = backbone modification: 5'-phosphorothioate
  modified_base 6: mod_base = OTHER; note = sugar modification: 2'-O-methoxyethylribose; note = thymine; note = backbone modification: 5'-phosphorothioate
  modified_base 7: mod_base = OTHER; note = sugar modification: 2'-O-methoxyethylribose; note = thymine; note = backbone modification: 5'-phosphorothioate
  modified_base 8: mod_base = OTHER; note = sugar modification: 2'-O-methoxyethylribose; note = backbone modification: 5'-phosphorothioate
  modified_base 9: mod_base = OTHER; note = thymine; note = backbone modification: 5'-phosphorothioate; note = sugar modification: 2'-O-methoxyethylribose
  modified_base 10: mod_base = OTHER; note = sugar modification: 2'-O-methoxyethylribose; note = backbone modification: 5'-phosphorothioate
  modified_base 11: mod_base = m5c; mod_base = OTHER; note = sugar modification: 2'-O-methoxyethylribose; note = backbone modification: 5'-phosphorothioate
  modified_base 12: mod_base = OTHER; note = sugar modification: 2'-O-methoxyethylribose; note = backbone modification: 5'-phosphorothioate; note = thymine
  modified_base 13: mod_base = OTHER; note = thymine; note = sugar modification: 2'-O-methoxyethylribose; note = backbone modification: 5'-phosphorothioate
  modified_base 14: mod_base = m5c; mod_base = OTHER; note = backbone modification: 5'-phosphorothioate; note = sugar modification: 2'-O-methoxyethylribose
  modified_base 15: mod_base = OTHER; note = backbone modification: 5'-phosphorothioate; note = sugar modification: 2'-O-methoxyethylribose
  modified_base 16: mod_base = OTHER; note = thymine; note = backbone modification: 5'-phosphorothioate; note = sugar modification: 2'-O-methoxyethylribose
  modified_base 17: mod_base = m5c; mod_base = OTHER; note = sugar modification: 2'-O-methoxyethylribose; note = backbone modification: 5'-phosphorothioate
  modified_base 18: mod_base = m5c; mod_base = OTHER; note = sugar modification: 2'-O-methoxyethylribose
tgttcttgtacttcatcc

SEQ ID NO: 558 - RNA, 18 nt, synthetic construct
  source 1..18: mol_type = other RNA; note = Antisense oligonucleotide
  modified_base 1: mod_base = OTHER; note = sugar modification: 2'-O-methoxyethylribose; note = backbone modification: 5'-phosphorothioate; note = thymine
  modified_base 2: mod_base = OTHER; note = backbone modification: 5'-phosphorothioate; note = sugar modification: 2'-O-methoxyethylribose
  modified_base 3: mod_base = OTHER; note = sugar modification: 2'-O-methoxyethylribose; note = backbone modification: 5'-phosphorothioate; note = thymine
  modified_base 4: mod_base = OTHER; note = thymine; note = sugar modification: 2'-O-methoxyethylribose; note = backbone modification: 5'-phosphorothioate
  modified_base 5: mod_base = m5c; mod_base = OTHER; note = sugar modification: 2'-O-methoxyethylribose; note = backbone modification: 5'-phosphorothioate
  modified_base 6: mod_base = OTHER; note = backbone modification: 5'-phosphorothioate; note = thymine; note = sugar modification: lna
  modified_base 7: mod_base = OTHER; note = sugar modification: 2'-O-methoxyethylribose; note = backbone modification: 5'-phosphorothioate; note = thymine
  modified_base 8: mod_base = OTHER; note = sugar modification: 2'-O-methoxyethylribose; note = backbone modification: 5'-phosphorothioate
  modified_base 9: mod_base = OTHER; note = thymine; note = backbone modification: 5'-phosphorothioate; note = sugar modification: 2'-O-methoxyethylribose
  modified_base 10: mod_base = OTHER; note = backbone modification: 5'-phosphorothioate; note = sugar modification: 2'-O-methoxyethylribose
  modified_base 11: mod_base = m5c; mod_base = OTHER; note = backbone modification: 5'-phosphorothioate; note = sugar modification: 2'-O-methoxyethylribose
  modified_base 12: mod_base = OTHER; note = backbone modification: 5'-phosphorothioate; note = thymine; note = sugar modification: 2'-O-methoxyethylribose
  modified_base 13: mod_base = OTHER; note = sugar modification: 2'-O-methoxyethylribose; note = backbone modification: 5'-phosphorothioate; note = thymine
  modified_base 14: mod_base = m5c; mod_base = OTHER; note = backbone modification: 5'-phosphorothioate; note = sugar modification: 2'-O-methoxyethylribose
  modified_base 15: mod_base = OTHER; note = sugar modification: 2'-O-methoxyethylribose; note = backbone modification: 5'-phosphorothioate
  modified_base 16: mod_base = OTHER; note = sugar modification: 2'-O-methoxyethylribose; note = thymine; note = backbone modification: 5'-phosphorothioate
  modified_base 17: mod_base = OTHER; mod_base = m5c; note = sugar modification: 2'-O-methoxyethylribose; note = backbone modification: 5'-phosphorothioate
  modified_base 18: mod_base = m5c; mod_base = OTHER; note = sugar modification: 2'-O-methoxyethylribose
tgttcttgtacttcatcc

SEQ ID NO: 559 - RNA, 18 nt, synthetic construct
  source 1..18: mol_type = other RNA; note = Antisense oligonucleotide
  modified_base 1: mod_base = OTHER; note = sugar modification: 2'-O-methoxyethylribose; note = thymine; note = backbone modification: 5'-phosphorothioate
  modified_base 2: mod_base = OTHER; note = backbone modification: 5'-phosphorothioate; note = sugar modification: 2'-O-methoxyethylribose
  modified_base 3: mod_base = OTHER; note = backbone modification: 5'-phosphorothioate; note = thymine; note = sugar modification: 2'-O-methoxyethylribose
  modified_base 4: mod_base = OTHER; note = backbone modification: 5'-phosphorothioate; note = sugar modification: 2'-O-methoxyethylribose; note = thymine
  modified_base 5: mod_base = OTHER; mod_base = m5c; note = backbone modification: 5'-phosphorothioate; note = sugar modification: 2'-O-methoxyethylribose
  modified_base 6: mod_base = OTHER; note = sugar modification: 2'-O-methoxyethylribose; note = thymine; note = backbone modification: 5'-phosphorothioate
  modified_base 7: mod_base = OTHER; note = backbone modification: 5'-phosphorothioate; note = thymine; note = sugar modification: lna
  modified_base 8: mod_base = OTHER; note = sugar modification: 2'-O-methoxyethylribose; note = backbone modification: 5'-phosphorothioate
  modified_base 9: mod_base = OTHER; note = sugar modification: 2'-O-methoxyethylribose; note = thymine; note = backbone modification: 5'-phosphorothioate
  modified_base 10: mod_base = OTHER; note = backbone modification: 5'-phosphorothioate; note = sugar modification: 2'-O-methoxyethylribose
  modified_base 11: mod_base = m5c; mod_base = OTHER; note = backbone modification: 5'-phosphorothioate; note = sugar modification: 2'-O-methoxyethylribose
  modified_base 12: mod_base = OTHER; note = backbone modification: 5'-phosphorothioate; note = sugar modification: 2'-O-methoxyethylribose; note = thymine
  modified_base 13: mod_base = OTHER; note = sugar modification: 2'-O-methoxyethylribose; note = thymine; note = backbone modification: 5'-phosphorothioate
  modified_base 14: mod_base = OTHER; mod_base = m5c; note = sugar modification: 2'-O-methoxyethylribose; note = backbone modification: 5'-phosphorothioate
  modified_base 15: mod_base = OTHER; note = sugar modification: 2'-O-methoxyethylribose; note = backbone modification: 5'-phosphorothioate
  modified_base 16: mod_base = OTHER; note = sugar modification: 2'-O-methoxyethylribose; note = thymine; note = backbone modification: 5'-phosphorothioate
  modified_base 17: mod_base = OTHER; mod_base = m5c; note = backbone modification: 5'-phosphorothioate; note = sugar modification: 2'-O-methoxyethylribose
  modified_base 18: mod_base = m5c; mod_base = OTHER; note = sugar modification: 2'-O-methoxyethylribose
tgttcttgtacttcatcc

SEQ ID NO: 560 - RNA, 18 nt, synthetic construct
  source 1..18: mol_type = other RNA; note = Antisense oligonucleotide
  modified_base 1: mod_base = OTHER; note = sugar modification: 2'-O-methoxyethylribose; note = backbone modification: 5'-phosphorothioate; note = thymine
  modified_base 2: mod_base = OTHER; note = backbone modification: 5'-phosphorothioate; note = sugar modification: 2'-O-methoxyethylribose
  modified_base 3: mod_base = OTHER; note = thymine; note = sugar modification: 2'-O-methoxyethylribose; note = backbone modification: 5'-phosphorothioate
  modified_base 4: mod_base = OTHER; note = thymine; note = sugar modification: 2'-O-methoxyethylribose; note = backbone modification: 5'-phosphorothioate
  modified_base 5: mod_base = m5c; mod_base = OTHER; note = sugar modification: 2'-O-methoxyethylribose; note = backbone modification: 5'-phosphorothioate
  modified_base 6: mod_base = OTHER; note = backbone modification: 5'-phosphorothioate; note = thymine; note = sugar modification: 2'-O-methoxyethylribose
  modified_base 7: mod_base = OTHER; note = thymine; note = sugar modification: 2'-O-methoxyethylribose; note = backbone modification: 5'-phosphorothioate
  modified_base 8: mod_base = OTHER; note = sugar modification: lna; note = backbone modification: 5'-phosphorothioate
  modified_base 9: mod_base = OTHER; note = sugar modification: 2'-O-methoxyethylribose; note = backbone modification: 5'-phosphorothioate; note = thymine
  modified_base 10: mod_base = OTHER; note = sugar modification: 2'-O-methoxyethylribose; note = backbone modification: 5'-phosphorothioate
  modified_base 11: mod_base = OTHER; mod_base = m5c; note = backbone modification: 5'-phosphorothioate; note = sugar modification: 2'-O-methoxyethylribose
  modified_base 12: mod_base = OTHER; note = thymine; note = sugar modification: 2'-O-methoxyethylribose; note = backbone modification: 5'-phosphorothioate
  modified_base 13: mod_base = OTHER; note = sugar modification: 2'-O-methoxyethylribose; note = backbone modification: 5'-phosphorothioate; note = thymine
  modified_base 14: mod_base = OTHER; mod_base = m5c; note = backbone modification: 5'-phosphorothioate; note = sugar modification: 2'-O-methoxyethylribose
  modified_base 15: mod_base = OTHER; note = sugar modification: 2'-O-methoxyethylribose; note = backbone modification: 5'-phosphorothioate
  modified_base 16: mod_base = OTHER; note = thymine; note = backbone modification: 5'-phosphorothioate; note = sugar modification: 2'-O-methoxyethylribose
  modified_base 17: mod_base = m5c; mod_base = OTHER; note = backbone modification: 5'-phosphorothioate; note = sugar modification: 2'-O-methoxyethylribose
  modified_base 18: mod_base = m5c; mod_base = OTHER; note = sugar modification: 2'-O-methoxyethylribose
tgttcttgtacttcatcc

SEQ ID NO: 561 - RNA, 18 nt, synthetic construct
  source 1..18: mol_type = other RNA; note = Antisense oligonucleotide
  modified_base 1: mod_base = OTHER; note = sugar modification: 2'-O-methoxyethylribose; note = thymine; note = backbone modification: 5'-phosphorothioate
  modified_base 2: mod_base = OTHER; note = sugar modification: 2'-O-methoxyethylribose; note = backbone modification: 5'-phosphorothioate
  modified_base 3: mod_base = OTHER; note = sugar modification: 2'-O-methoxyethylribose; note = thymine; note = backbone modification: 5'-phosphorothioate
  modified_base 4: mod_base = OTHER; note = sugar modification: 2'-O-methoxyethylribose; note = backbone modification: 5'-phosphorothioate; note = thymine
  modified_base 5: mod_base = m5c; mod_base = OTHER; note = backbone modification: 5'-phosphorothioate; note = sugar modification: 2'-O-methoxyethylribose
  modified_base 6: mod_base = OTHER; note = backbone modification: 5'-phosphorothioate; note = sugar modification: 2'-O-methoxyethylribose; note = thymine
  modified_base 7: mod_base = OTHER; note = backbone modification: 5'-phosphorothioate; note = sugar modification: 2'-O-methoxyethylribose; note = thymine
  modified_base 8: mod_base = OTHER; note = sugar modification: 2'-O-methoxyethylribose; note = backbone modification: 5'-phosphorothioate
  modified_base 9: mod_base = OTHER; note = backbone modification: 5'-phosphorothioate; note = thymine; note = sugar modification: lna
  modified_base 10: mod_base = OTHER; note = sugar modification: 2'-O-methoxyethylribose; note = backbone modification: 5'-phosphorothioate
  modified_base 11: mod_base = m5c; mod_base = OTHER; note = sugar modification: 2'-O-methoxyethylribose; note = backbone modification: 5'-phosphorothioate
  modified_base 12: mod_base = OTHER; note = backbone modification: 5'-phosphorothioate; note = sugar modification: 2'-O-methoxyethylribose; note = thymine
  modified_base 13: mod_base = OTHER; note = sugar modification: 2'-O-methoxyethylribose; note = thymine; note = backbone modification: 5'-phosphorothioate
  modified_base 14: mod_base = m5c; mod_base = OTHER; note = sugar modification: 2'-O-methoxyethylribose; note = backbone modification: 5'-phosphorothioate
  modified_base 15: mod_base = OTHER; note = sugar modification: 2'-O-methoxyethylribose; note = backbone modification: 5'-phosphorothioate
  modified_base 16: mod_base = OTHER; note = thymine; note = sugar modification: 2'-O-methoxyethylribose; note = backbone modification: 5'-phosphorothioate
  modified_base 17: mod_base = m5c; mod_base = OTHER; note = sugar modification: 2'-O-methoxyethylribose; note = backbone modification: 5'-phosphorothioate
  modified_base 18: mod_base = m5c; mod_base = OTHER; note = sugar modification: 2'-O-methoxyethylribose
tgttcttgtacttcatcc

SEQ ID NO: 562 - RNA, 18 nt, synthetic construct
  source 1..18: mol_type = other RNA; note = Antisense oligonucleotide
  modified_base 1: mod_base = OTHER; note = thymine; note = sugar modification: 2'-O-methoxyethylribose; note = backbone modification: 5'-phosphorothioate
  modified_base 2: mod_base = OTHER; note = backbone modification: 5'-phosphorothioate; note = sugar modification: 2'-O-methoxyethylribose
  modified_base 3: mod_base = OTHER; note = backbone modification: 5'-phosphorothioate; note = sugar modification: 2'-O-methoxyethylribose; note = thymine
  modified_base 4: mod_base = OTHER; note = thymine; note = sugar modification: 2'-O-methoxyethylribose; note = backbone modification: 5'-phosphorothioate
  modified_base 5: mod_base = m5c; mod_base = OTHER; note = sugar modification: 2'-O-methoxyethylribose; note = backbone modification: 5'-phosphorothioate
  modified_base 6: mod_base = OTHER; note = backbone modification: 5'-phosphorothioate; note = thymine; note = sugar modification: 2'-O-methoxyethylribose
  modified_base 7: mod_base = OTHER; note = backbone modification: 5'-phosphorothioate; note = thymine; note = sugar modification: 2'-O-methoxyethylribose
  modified_base 8: mod_base = OTHER; note = sugar modification: 2'-O-methoxyethylribose; note = backbone modification: 5'-phosphorothioate
  modified_base 9: mod_base = OTHER; note = backbone modification: 5'-phosphorothioate; note = sugar modification: 2'-O-methoxyethylribose; note = thymine
  modified_base 10: mod_base = OTHER; note = sugar modification: lna; note = backbone modification: 5'-phosphorothioate
  modified_base 11: mod_base = m5c; mod_base = OTHER; note = sugar modification: 2'-O-methoxyethylribose; note = backbone modification: 5'-phosphorothioate
  modified_base 12: mod_base = OTHER; note = sugar modification: 2'-O-methoxyethylribose; note = thymine; note = backbone modification: 5'-phosphorothioate
  modified_base 13: mod_base = OTHER; note = thymine; note = backbone modification: 5'-phosphorothioate; note = sugar modification: 2'-O-methoxyethylribose
  modified_base 14: mod_base = OTHER; mod_base = m5c; note = backbone modification: 5'-phosphorothioate; note = sugar modification: 2'-O-methoxyethylribose
  modified_base 15: mod_base = OTHER; note = sugar modification: 2'-O-methoxyethylribose; note = backbone modification: 5'-phosphorothioate
  modified_base 16: mod_base = OTHER; note = backbone modification: 5'-phosphorothioate; note = thymine; note = sugar modification: 2'-O-methoxyethylribose
  modified_base 17: mod_base = m5c; mod_base = OTHER; note = sugar modification: 2'-O-methoxyethylribose; note = backbone modification: 5'-phosphorothioate
  modified_base 18: mod_base = OTHER; mod_base = m5c; note = sugar modification: 2'-O-methoxyethylribose
tgttcttgtacttcatcc

SEQ ID NO: 563 - RNA, 18 nt, synthetic construct
  source 1..18: mol_type = other RNA; note = Antisense oligonucleotide
  modified_base 1: mod_base = OTHER; note = thymine; note = sugar modification: 2'-O-methoxyethylribose; note = backbone modification: 5'-phosphorothioate
  modified_base 2: mod_base = OTHER; note = backbone modification: 5'-phosphorothioate; note = sugar modification: 2'-O-methoxyethylribose
  modified_base 3: mod_base = OTHER; note = thymine; note = backbone modification: 5'-phosphorothioate; note = sugar modification: 2'-O-methoxyethylribose
  modified_base 4: mod_base = OTHER; note = backbone modification: 5'-phosphorothioate; note = thymine; note = sugar modification: 2'-O-methoxyethylribose
  modified_base 5: mod_base = OTHER; mod_base = m5c; note = backbone modification: 5'-phosphorothioate; note = sugar modification: 2'-O-methoxyethylribose
  modified_base 6: mod_base = OTHER; note = backbone modification: 5'-phosphorothioate; note = sugar modification: 2'-O-methoxyethylribose; note = thymine
  modified_base 7: mod_base = OTHER; note = sugar modification: 2'-O-methoxyethylribose; note = backbone modification: 5'-phosphorothioate; note = thymine
  modified_base 8: mod_base = OTHER; note = backbone modification: 5'-phosphorothioate; note = sugar modification: 2'-O-methoxyethylribose
  modified_base 9: mod_base = OTHER; note = sugar modification: 2'-O-methoxyethylribose; note = backbone modification: 5'-phosphorothioate; note = thymine
  modified_base 10: mod_base = OTHER; note = sugar modification: 2'-O-methoxyethylribose; note = backbone modification: 5'-phosphorothioate
  modified_base 11: mod_base = OTHER; mod_base = m5c; note = backbone modification: 5'-phosphorothioate; note = sugar modification: lna
  modified_base 12: mod_base = OTHER; note = sugar modification: 2'-O-methoxyethylribose; note = backbone modification: 5'-phosphorothioate; note = thymine
  modified_base 13: mod_base = OTHER; note = backbone modification: 5'-phosphorothioate; note = thymine; note = sugar modification: 2'-O-methoxyethylribose
  modified_base 14: mod_base = m5c; mod_base = OTHER; note = sugar modification: 2'-O-methoxyethylribose; note = backbone modification: 5'-phosphorothioate
  modified_base 15: mod_base = OTHER; note = backbone modification: 5'-phosphorothioate; note = sugar modification: 2'-O-methoxyethylribose
  modified_base 16: mod_base = OTHER; note = thymine; note = sugar modification: 2'-O-methoxyethylribose; note = backbone modification: 5'-phosphorothioate
  modified_base 17: mod_base = m5c; mod_base = OTHER; note = sugar modification: 2'-O-methoxyethylribose; note = backbone modification: 5'-phosphorothioate
  modified_base 18: mod_base = m5c; mod_base = OTHER; note = sugar modification: 2'-O-methoxyethylribose
tgttcttgtacttcatcc

SEQ ID NO: 564 - RNA, 18 nt, synthetic construct
  source 1..18: mol_type = other RNA; note = Antisense oligonucleotide
  modified_base 1: mod_base = OTHER; note = thymine; note = sugar modification: 2'-O-methoxyethylribose; note = backbone modification: 5'-phosphorothioate
  modified_base 2: mod_base = OTHER; note = backbone modification: 5'-phosphorothioate; note = sugar modification: 2'-O-methoxyethylribose
  modified_base 3: mod_base = OTHER; note = backbone modification: 5'-phosphorothioate; note = thymine; note = sugar modification: 2'-O-methoxyethylribose
  modified_base 4: mod_base = OTHER; note = sugar modification: 2'-O-methoxyethylribose; note = thymine; note = backbone modification: 5'-phosphorothioate
  modified_base 5: mod_base = OTHER; mod_base = m5c; note = backbone modification: 5'-phosphorothioate; note = sugar modification: 2'-O-methoxyethylribose
  modified_base 6: mod_base = OTHER; note = thymine; note = backbone modification: 5'-phosphorothioate; note = sugar modification: 2'-O-methoxyethylribose
  modified_base 7: mod_base = OTHER; note = thymine; note = sugar modification: 2'-O-methoxyethylribose; note = backbone modification: 5'-phosphorothioate
  modified_base 8: mod_base = OTHER; note = backbone modification: 5'-phosphorothioate; note = sugar modification: 2'-O-methoxyethylribose
  modified_base 9: mod_base = OTHER; note = backbone modification: 5'-phosphorothioate; note = thymine; note = sugar modification: 2'-O-methoxyethylribose
  modified_base 10: mod_base = OTHER; note = sugar modification: 2'-O-methoxyethylribose; note = backbone modification: 5'-phosphorothioate
  modified_base 11: mod_base = m5c; mod_base = OTHER; note = sugar modification: 2'-O-methoxyethylribose; note = backbone modification: 5'-phosphorothioate
  modified_base 12: mod_base = OTHER; note = thymine; note = backbone modification: 5'-phosphorothioate; note = sugar modification: lna
  modified_base 13: mod_base = OTHER; note = sugar modification: 2'-O-methoxyethylribose; note = backbone modification: 5'-phosphorothioate; note = thymine
  modified_base 14: mod_base = OTHER; mod_base = m5c; note = sugar modification: 2'-O-methoxyethylribose; note = backbone modification: 5'-phosphorothioate
  modified_base 15: mod_base = OTHER; note = sugar modification: 2'-O-methoxyethylribose; note = backbone modification: 5'-phosphorothioate
  modified_base 16: mod_base = OTHER; note = backbone modification: 5'-phosphorothioate; note = sugar modification: 2'-O-methoxyethylribose; note = thymine
  modified_base 17: mod_base = m5c; mod_base = OTHER; note = backbone modification: 5'-phosphorothioate; note = sugar modification: 2'-O-methoxyethylribose
  modified_base 18: mod_base = m5c; mod_base = OTHER; note = sugar modification: 2'-O-methoxyethylribose
tgttcttgtacttcatcc

SEQ ID NO: 565 - RNA, 18 nt, synthetic construct
  source 1..18: mol_type = other RNA; note = Antisense oligonucleotide
  modified_base 1: mod_base = OTHER; note = thymine; note = sugar modification: 2'-O-methoxyethylribose; note = backbone modification: 5'-phosphorothioate
  modified_base 2: mod_base = OTHER; note = backbone modification: 5'-phosphorothioate; note = sugar modification: 2'-O-methoxyethylribose
  modified_base 3: mod_base = OTHER; note = thymine; note = sugar modification: 2'-O-methoxyethylribose; note = backbone modification: 5'-phosphorothioate
  modified_base 4: mod_base = OTHER; note = backbone modification: 5'-phosphorothioate; note = sugar modification: 2'-O-methoxyethylribose; note = thymine
  modified_base 5: mod_base = m5c; mod_base = OTHER; note = backbone modification: 5'-phosphorothioate; note = sugar modification: 2'-O-methoxyethylribose
  modified_base 6: mod_base = OTHER; note = thymine; note = backbone modification: 5'-phosphorothioate; note = sugar modification: 2'-O-methoxyethylribose
  modified_base 7: mod_base = OTHER; note = thymine; note = sugar modification: 2'-O-methoxyethylribose; note = backbone modification: 5'-phosphorothioate
  modified_base 8: mod_base = OTHER; note = sugar modification: 2'-O-methoxyethylribose; note = backbone modification: 5'-phosphorothioate
  modified_base 9: mod_base = OTHER; note = thymine; note = backbone modification: 5'-phosphorothioate; note = sugar modification: 2'-O-methoxyethylribose
  modified_base 10: mod_base = OTHER; note = sugar modification: 2'-O-methoxyethylribose; note = backbone modification: 5'-phosphorothioate
  modified_base 11: mod_base = OTHER; mod_base = m5c; note = backbone modification: 5'-phosphorothioate; note = sugar modification: 2'-O-methoxyethylribose
  modified_base 12: mod_base = OTHER; note = thymine; note = sugar modification: 2'-O-methoxyethylribose; note = backbone modification: 5'-phosphorothioate
  modified_base 13: mod_base = OTHER; note = backbone modification: 5'-phosphorothioate; note = sugar modification: lna; note = thymine
  modified_base 14: mod_base = OTHER; mod_base = m5c; note = backbone modification: 5'-phosphorothioate; note = sugar modification: 2'-O-methoxyethylribose
  modified_base 15: mod_base = OTHER; note = backbone modification: 5'-phosphorothioate; note = sugar modification: 2'-O-methoxyethylribose
  modified_base 16: mod_base = OTHER; note = thymine; note = backbone modification: 5'-phosphorothioate; note = sugar modification: 2'-O-methoxyethylribose
  modified_base 17: mod_base = OTHER; mod_base = m5c; note = backbone modification: 5'-phosphorothioate; note = sugar modification: 2'-O-methoxyethylribose
  modified_base 18: mod_base = m5c; mod_base = OTHER; note = sugar modification: 2'-O-methoxyethylribose
tgttcttgtacttcatcc

SEQ ID NO: 566 - RNA, 18 nt, synthetic construct
  source 1..18: mol_type = other RNA; note = Antisense oligonucleotide
  modified_base 1: mod_base = OTHER; note = sugar modification: 2'-O-methoxyethylribose; note = backbone modification: 5'-phosphorothioate; note = thymine
  modified_base 2: mod_base = OTHER; note = backbone modification: 5'-phosphorothioate; note = sugar modification: 2'-O-methoxyethylribose
  modified_base 3: mod_base = OTHER; note = backbone modification: 5'-phosphorothioate; note = sugar modification: 2'-O-methoxyethylribose; note = thymine
  modified_base 4: mod_base = OTHER; note = backbone modification: 5'-phosphorothioate; note = sugar modification: 2'-O-methoxyethylribose; note = thymine
  modified_base 5: mod_base = m5c; mod_base = OTHER; note = backbone modification: 5'-phosphorothioate; note = sugar modification: 2'-O-methoxyethylribose
  modified_base 6: mod_base = OTHER; note = sugar modification: 2'-O-methoxyethylribose; note = thymine; note = backbone modification: 5'-phosphorothioate
  modified_base 7: mod_base = OTHER; note = sugar modification: 2'-O-methoxyethylribose; note = thymine; note = backbone modification: 5'-phosphorothioate
  modified_base 8: mod_base = OTHER; note = backbone modification: 5'-phosphorothioate; note = sugar modification: 2'-O-methoxyethylribose
  modified_base 9: mod_base = OTHER; note = backbone modification: 5'-phosphorothioate; note = thymine; note = sugar modification: 2'-O-methoxyethylribose
  modified_base 10: mod_base = OTHER; note = sugar modification: 2'-O-methoxyethylribose; note = backbone modification: 5'-phosphorothioate
  modified_base 11: mod_base = OTHER; mod_base = m5c; note = sugar modification: 2'-O-methoxyethylribose; note = backbone modification: 5'-phosphorothioate
  modified_base 12: mod_base = OTHER; note = thymine; note = backbone modification: 5'-phosphorothioate; note = sugar modification: 2'-O-methoxyethylribose
  modified_base 13: mod_base = OTHER; note = backbone modification: 5'-phosphorothioate; note = sugar modification: 2'-O-methoxyethylribose; note = thymine
  modified_base 14: mod_base = m5c; mod_base = OTHER; note = backbone modification: 5'-phosphorothioate; note = sugar modification: lna
  modified_base 15: mod_base = OTHER; note = backbone modification: 5'-phosphorothioate; note = sugar modification: 2'-O-methoxyethylribose
  modified_base 16: mod_base = OTHER; note = thymine; note = backbone modification: 5'-phosphorothioate; note = sugar modification: 2'-O-methoxyethylribose
  modified_base 17: mod_base = OTHER; mod_base = m5c; note = backbone modification: 5'-phosphorothioate; note = sugar modification: 2'-O-methoxyethylribose
  modified_base 18: mod_base = m5c; mod_base = OTHER; note = sugar modification: 2'-O-methoxyethylribose
tgttcttgtacttcatcc

SEQ ID NO: 567 - RNA, 18 nt, synthetic construct
  source 1..18: mol_type = other RNA; note = Antisense oligonucleotide
  modified_base 1: mod_base = OTHER; note = thymine; note = sugar modification: 2'-O-methoxyethylribose; note = backbone modification: 5'-phosphorothioate
  modified_base 2: mod_base = OTHER; note = backbone modification: 5'-phosphorothioate; note = sugar modification: 2'-O-methoxyethylribose
  modified_base 3: mod_base = OTHER; note = sugar modification: 2'-O-methoxyethylribose; note = thymine; note = backbone modification: 5'-phosphorothioate
  modified_base 4: mod_base = OTHER; note = backbone modification: 5'-phosphorothioate; note = sugar modification: 2'-O-methoxyethylribose; note = thymine
  modified_base 5: mod_base = m5c; mod_base = OTHER; note = backbone modification: 5'-phosphorothioate; note = sugar modification: 2'-O-methoxyethylribose
  modified_base 6: mod_base = OTHER; note = thymine; note = sugar modification: 2'-O-methoxyethylribose; note = backbone modification: 5'-phosphorothioate
  modified_base 7: mod_base = OTHER; note = backbone modification: 5'-phosphorothioate; note = sugar modification: 2'-O-methoxyethylribose; note = thymine
  modified_base 8: mod_base = OTHER; note = sugar modification: 2'-O-methoxyethylribose; note = backbone modification: 5'-phosphorothioate
  modified_base 9: mod_base = OTHER; note = sugar modification: 2'-O-methoxyethylribose; note = thymine; note = backbone modification: 5'-phosphorothioate
  modified_base 10: mod_base = OTHER; note = sugar modification: 2'-O-methoxyethylribose; note = backbone modification: 5'-phosphorothioate
  modified_base 11: mod_base = m5c; mod_base = OTHER; note = sugar modification: 2'-O-methoxyethylribose; note = backbone modification: 5'-phosphorothioate
  modified_base 12: mod_base = OTHER; note = thymine; note = backbone modification: 5'-phosphorothioate; note = sugar modification: 2'-O-methoxyethylribose
  modified_base 13: mod_base = OTHER; note = backbone modification: 5'-phosphorothioate; note = sugar modification: 2'-O-methoxyethylribose; note = thymine
  modified_base 14: mod_base = OTHER; mod_base = m5c; note = sugar modification: 2'-O-methoxyethylribose; note = backbone modification: 5'-phosphorothioate
  modified_base 15: mod_base = OTHER; note = sugar modification: lna; note = backbone modification: 5'-phosphorothioate
  modified_base 16: mod_base = OTHER; note = backbone modification: 5'-phosphorothioate; note = thymine; note = sugar modification: 2'-O-methoxyethylribose
  modified_base 17: mod_base = m5c; mod_base = OTHER; note = backbone modification: 5'-phosphorothioate; note = sugar modification: 2'-O-methoxyethylribose
  modified_base 18: mod_base = m5c; mod_base = OTHER; note = sugar modification: 2'-O-methoxyethylribose
tgttcttgtacttcatcc

SEQ ID NO: 568 - RNA, 18 nt, synthetic construct
  source 1..18: mol_type = other RNA; note = Antisense oligonucleotide
  modified_base 1: mod_base = OTHER; note = thymine; note = backbone modification: 5'-phosphorothioate; note = sugar modification: 2'-O-methoxyethylribose
  modified_base 2: mod_base = OTHER; note = sugar modification: 2'-O-methoxyethylribose; note = backbone modification: 5'-phosphorothioate
  modified_base 3: mod_base = OTHER; note = backbone modification: 5'-phosphorothioate; note = sugar modification: 2'-O-methoxyethylribose; note = thymine
  modified_base 4: mod_base = OTHER; note = backbone modification: 5'-phosphorothioate; note = thymine; note = sugar modification: 2'-O-methoxyethylribose
  modified_base 5: mod_base = m5c; mod_base = OTHER; note = sugar modification: 2'-O-methoxyethylribose; note = backbone modification: 5'-phosphorothioate
  modified_base 6: mod_base = OTHER; note = sugar modification: 2'-O-methoxyethylribose; note = backbone modification: 5'-phosphorothioate; note = thymine
  modified_base 7: mod_base = OTHER; note = sugar modification: 2'-O-methoxyethylribose; note = backbone modification: 5'-phosphorothioate; note = thymine
  modified_base 8: mod_base = OTHER; note = sugar modification: 2'-O-methoxyethylribose; note = backbone modification: 5'-phosphorothioate
  modified_base 9: mod_base = OTHER; note = thymine; note = backbone modification: 5'-phosphorothioate; note = sugar modification: 2'-O-methoxyethylribose
  modified_base 10: mod_base = OTHER; note = sugar modification: 2'-O-methoxyethylribose; note = backbone modification: 5'-phosphorothioate
  modified_base 11: mod_base = OTHER; mod_base = m5c; note = sugar modification: 2'-O-methoxyethylribose; note = backbone modification: 5'-phosphorothioate
  modified_base 12: mod_base = OTHER; note = backbone modification: 5'-phosphorothioate; note = sugar modification: 2'-O-methoxyethylribose; note = thymine
  modified_base 13: mod_base = OTHER; note = thymine; note = backbone modification: 5'-phosphorothioate; note = sugar modification: 2'-O-methoxyethylribose
  modified_base 14: mod_base = OTHER; mod_base = m5c; note = sugar modification: 2'-O-methoxyethylribose; note = backbone modification: 5'-phosphorothioate
  modified_base 15: mod_base = OTHER; note = backbone modification: 5'-phosphorothioate; note = sugar modification: 2'-O-methoxyethylribose
  modified_base 16: mod_base = OTHER; note = thymine; note = sugar modification: lna; note = backbone modification: 5'-phosphorothioate
  modified_base 17: mod_base = OTHER; mod_base = m5c; note = sugar modification: 2'-O-methoxyethylribose; note = backbone modification: 5'-phosphorothioate
  modified_base 18: mod_base = m5c; mod_base = OTHER; note = sugar modification: 2'-O-methoxyethylribose
tgttcttgtacttcatcc

SEQ ID NO: 569 - RNA, 18 nt, synthetic construct
  source 1..18: mol_type = other RNA; note = Antisense oligonucleotide
  modified_base 1: mod_base = OTHER; note = thymine; note = sugar modification: 2'-O-methoxyethylribose; note = backbone modification: 5'-phosphorothioate
  modified_base 2: mod_base = OTHER; note = backbone modification: 5'-phosphorothioate; note = sugar modification: 2'-O-methoxyethylribose
  modified_base 3: mod_base = OTHER; note = sugar modification: 2'-O-methoxyethylribose; note = backbone modification: 5'-phosphorothioate; note = thymine
  modified_base 4: mod_base = OTHER; note = backbone modification: 5'-phosphorothioate; note = sugar modification: 2'-O-methoxyethylribose; note = thymine
  modified_base 5: mod_base = m5c; mod_base = OTHER; note = sugar modification: 2'-O-methoxyethylribose; note = backbone modification: 5'-phosphorothioate
  modified_base 6: mod_base = OTHER; note = sugar modification: 2'-O-methoxyethylribose; note = thymine; note = backbone modification: 5'-phosphorothioate
  modified_base 7: mod_base = OTHER; note = thymine; note = backbone modification: 5'-phosphorothioate; note = sugar modification: 2'-O-methoxyethylribose
  modified_base 8: mod_base = OTHER; note = backbone modification: 5'-phosphorothioate; note = sugar modification: 2'-O-methoxyethylribose
  modified_base 9: mod_base = OTHER; note = sugar modification: 2'-O-methoxyethylribose; note = thymine; note = backbone modification: 5'-phosphorothioate
  modified_base 10: mod_base = OTHER; note = backbone modification: 5'-phosphorothioate; note = sugar modification: 2'-O-methoxyethylribose
  modified_base 11: mod_base = m5c; mod_base = OTHER; note = sugar modification: 2'-O-methoxyethylribose; note = backbone modification: 5'-phosphorothioate
  modified_base 12: mod_base = OTHER; note = backbone modification: 5'-phosphorothioate; note = sugar modification: 2'-O-methoxyethylribose; note = thymine
  modified_base 13: mod_base = OTHER; note = sugar modification: 2'-O-methoxyethylribose; note = thymine; note = backbone modification: 5'-phosphorothioate
  modified_base 14: mod_base = m5c; mod_base = OTHER; note = backbone modification: 5'-phosphorothioate; note = sugar modification: 2'-O-methoxyethylribose
  modified_base 15: mod_base = OTHER; note = backbone modification: 5'-phosphorothioate; note = sugar modification: 2'-O-methoxyethylribose
  modified_base 16: mod_base = OTHER; note = thymine; note = sugar modification: 2'-O-methoxyethylribose; note = backbone modification: 5'-phosphorothioate
  modified_base 17: mod_base = OTHER; mod_base = m5c; note = sugar modification: lna; note = backbone modification: 5'-phosphorothioate
  modified_base 18: mod_base = OTHER; mod_base = m5c; note = sugar modification: 2'-O-methoxyethylribose
tgttcttgtacttcatcc

SEQ ID NO: 570 - RNA, 18 nt, synthetic construct
  source 1..18: mol_type = other RNA; note = Antisense oligonucleotide
  modified_base 1: mod_base = OTHER; note = sugar modification: 2'-O-methoxyethylribose; note = thymine; note = backbone modification: 5'-phosphorothioate
  modified_base 2: mod_base = OTHER; note = sugar modification: 2'-O-methoxyethylribose; note = backbone modification: 5'-phosphorothioate
  modified_base 3: mod_base = OTHER; note = thymine; note = backbone modification: 5'-phosphorothioate; note = sugar modification: 2'-O-methoxyethylribose
  modified_base 4: mod_base = OTHER; note = thymine; note = backbone modification: 5'-phosphorothioate; note = sugar modification: 2'-O-methoxyethylribose
  modified_base 5: mod_base = m5c; mod_base = OTHER; note = sugar modification: 2'-O-methoxyethylribose; note = backbone modification: 5'-phosphorothioate
  modified_base 6: mod_base = OTHER; note = backbone modification: 5'-phosphorothioate; note = thymine; note = sugar modification: 2'-O-methoxyethylribose
  modified_base 7: mod_base = OTHER; note = thymine; note = sugar modification: 2'-O-methoxyethylribose; note = backbone modification: 5'-phosphorothioate
  modified_base 8: mod_base = OTHER; note = backbone modification: 5'-phosphorothioate; note = sugar modification: 2'-O-methoxyethylribose
  modified_base 9: mod_base = OTHER; note = backbone modification: 5'-phosphorothioate; note = thymine; note = sugar modification: 2'-O-methoxyethylribose
  modified_base 10: mod_base = OTHER; note = sugar modification: 2'-O-methoxyethylribose; note = backbone modification: 5'-phosphorothioate
  modified_base 11: mod_base = OTHER; mod_base = m5c; note = backbone modification: 5'-phosphorothioate; note = sugar modification: 2'-O-methoxyethylribose
  modified_base 12: mod_base = OTHER; note = thymine; note = sugar modification: 2'-O-methoxyethylribose; note = backbone modification: 5'-phosphorothioate
  modified_base 13: mod_base = OTHER; note = sugar modification: 2'-O-methoxyethylribose; note = backbone modification: 5'-phosphorothioate; note = thymine
  modified_base 14: mod_base = m5c; mod_base = OTHER; note = backbone modification: 5'-phosphorothioate; note = sugar modification: 2'-O-methoxyethylribose
  modified_base 15: mod_base = OTHER; note = sugar modification: 2'-O-methoxyethylribose; note = backbone modification: 5'-phosphorothioate
  modified_base 16: mod_base = OTHER; note = backbone modification: 5'-phosphorothioate; note = sugar modification: 2'-O-methoxyethylribose; note = thymine
  modified_base 17: mod_base = OTHER; mod_base = m5c; note = sugar modification: 2'-O-methoxyethylribose; note = backbone modification: 5'-phosphorothioate
  modified_base 18: mod_base = OTHER; mod_base = m5c; note = sugar modification: lna
tgttcttgtacttcatcc

SEQ ID NO: 571 - RNA, 18 nt, synthetic construct
  source 1..18: mol_type = other RNA; note = Antisense oligonucleotide
  modified_base 1: mod_base = OTHER; note = sugar modification: lna; note = backbone modification: 5'-phosphorothioate
  modified_base 2: mod_base = OTHER; note = sugar modification: 2'-O-methoxyethylribose; note = backbone modification: 5'-phosphorothioate
  modified_base 3: mod_base = OTHER; note = sugar modification: 2'-O-methoxyethylribose; note = backbone modification: 5'-phosphorothioate
  modified_base 4: mod_base = OTHER; note = sugar modification: 2'-O-methoxyethylribose; note = backbone modification: 5'-phosphorothioate; note = thymine
  modified_base 5: mod_base = OTHER; note = sugar modification: 2'-O-methoxyethylribose; note = backbone modification: 5'-phosphorothioate
  modified_base 6: mod_base = OTHER; note = backbone modification: 5'-phosphorothioate; note = sugar modification: 2'-O-methoxyethylribose; note = thymine
  modified_base 7: mod_base = OTHER; note = sugar modification: 2'-O-methoxyethylribose; note = thymine; note = backbone modification: 5'-phosphorothioate
  modified_base 8: mod_base = m5c; mod_base = OTHER; note = backbone modification: 5'-phosphorothioate; note = sugar modification: 2'-O-methoxyethylribose
  modified_base 9: mod_base = OTHER; note = thymine; note = backbone modification: 5'-phosphorothioate; note = sugar modification: 2'-O-methoxyethylribose
  modified_base 10: mod_base = OTHER; note = sugar modification: 2'-O-methoxyethylribose; note = thymine; note = backbone modification: 5'-phosphorothioate
  modified_base 11: mod_base = OTHER; note = sugar modification: 2'-O-methoxyethylribose; note = backbone modification: 5'-phosphorothioate
  modified_base 12: mod_base = OTHER; note = backbone modification: 5'-phosphorothioate; note = sugar modification: 2'-O-methoxyethylribose; note = thymine
  modified_base 13: mod_base = OTHER; note = backbone modification: 5'-phosphorothioate; note = sugar modification: 2'-O-methoxyethylribose
  modified_base 14: mod_base = m5c; mod_base = OTHER; note = backbone modification: 5'-phosphorothioate; note = sugar modification: 2'-O-methoxyethylribose
  modified_base 15: mod_base = OTHER; note = thymine; note = backbone modification: 5'-phosphorothioate; note = sugar modification: 2'-O-methoxyethylribose
  modified_base 16: mod_base = OTHER; note = sugar modification: 2'-O-methoxyethylribose; note = backbone modification: 5'-phosphorothioate; note = thymine
  modified_base 17: mod_base = m5c; mod_base = OTHER; note = backbone modification: 5'-phosphorothioate; note = sugar modification: 2'-O-methoxyethylribose
  modified_base 18: mod_base = OTHER; note = sugar modification: 2'-O-methoxyethylribose
aggtgttcttgtacttca

SEQ ID NO: 572 - RNA, 18 nt, synthetic construct
  source 1..18: mol_type = other RNA; note = Antisense oligonucleotide
  modified_base 1: mod_base = OTHER; note = sugar modification: 2'-O-methoxyethylribose; note = backbone modification: 5'-phosphorothioate
  modified_base 2: mod_base = OTHER; note = sugar modification: lna; note = backbone modification: 5'-phosphorothioate
  modified_base 3: mod_base = OTHER; note = sugar modification: 2'-O-methoxyethylribose; note = backbone modification: 5'-phosphorothioate
  modified_base 4: mod_base = OTHER; note = thymine; note = backbone modification: 5'-phosphorothioate; note = sugar modification: 2'-O-methoxyethylribose
  modified_base 5: mod_base = OTHER; note = backbone modification: 5'-phosphorothioate; note = sugar modification: 2'-O-methoxyethylribose
  modified_base 6: mod_base = OTHER; note = sugar modification: 2'-O-methoxyethylribose; note = thymine; note = backbone modification: 5'-phosphorothioate
  modified_base 7: mod_base = OTHER; note = backbone modification: 5'-phosphorothioate; note = sugar modification: 2'-O-methoxyethylribose; note = thymine
  modified_base 8: mod_base = m5c; mod_base = OTHER; note = sugar modification: 2'-O-methoxyethylribose; note = backbone modification: 5'-phosphorothioate
  modified_base 9: mod_base = OTHER; note = backbone modification: 5'-phosphorothioate; note = thymine; note = sugar modification: 2'-O-methoxyethylribose
  modified_base 10: mod_base = OTHER; note = sugar modification: 2'-O-methoxyethylribose; note = backbone modification: 5'-phosphorothioate; note = thymine
  modified_base 11: mod_base = OTHER; note = sugar modification: 2'-O-methoxyethylribose; note = backbone modification: 5'-phosphorothioate
  modified_base 12: mod_base = OTHER; note = sugar modification: 2'-O-methoxyethylribose; note = thymine; note = backbone modification: 5'-phosphorothioate
  modified_base 13: mod_base = OTHER; note = backbone modification: 5'-phosphorothioate; note = sugar modification: 2'-O-methoxyethylribose
  modified_base 14: mod_base = m5c; mod_base = OTHER; note = backbone modification: 5'-phosphorothioate; note = sugar modification: 2'-O-methoxyethylribose
  modified_base 15: mod_base = OTHER; note = sugar modification: 2'-O-methoxyethylribose; note = backbone modification: 5'-phosphorothioate; note = thymine
  modified_base 16: mod_base = OTHER; note = thymine; note = backbone modification: 5'-phosphorothioate; note = sugar modification: 2'-O-methoxyethylribose
  modified_base 17: mod_base = OTHER; mod_base = m5c; note = sugar modification: 2'-O-methoxyethylribose; note = backbone modification: 5'-phosphorothioate
  modified_base 18: mod_base = OTHER; note = sugar modification: 2'-O-methoxyethylribose
aggtgttcttgtacttca

SEQ ID NO: 573 - RNA, 18 nt, synthetic construct
  source 1..18: mol_type = other RNA; note = Antisense oligonucleotide
  modified_base 1: mod_base = OTHER; note = backbone modification: 5'-phosphorothioate; note = thymine; note = sugar modification: lna
  modified_base 2: mod_base = OTHER; note = sugar modification: 2'-O-methoxyethylribose; note = backbone modification: 5'-phosphorothioate
  modified_base 3: mod_base = OTHER; note = thymine; note = sugar modification: 2'-O-methoxyethylribose; note = backbone modification: 5'-phosphorothioate
  modified_base 4: mod_base = OTHER; note = sugar modification: 2'-O-methoxyethylribose; note = thymine; note = backbone modification: 5'-phosphorothioate
  modified_base 5: mod_base = OTHER; mod_base = m5c; note = sugar modification: 2'-O-methoxyethylribose; note = backbone modification: 5'-phosphorothioate
  modified_base 6: mod_base = OTHER; note = backbone modification: 5'-phosphorothioate; note = sugar modification: 2'-O-methoxyethylribose; note = thymine
  modified_base 7: mod_base = OTHER; note = thymine; note = sugar modification: 2'-O-methoxyethylribose; note = backbone modification: 5'-phosphorothioate
  modified_base 8: mod_base = OTHER; note = sugar modification: 2'-O-methoxyethylribose; note = backbone modification: 5'-phosphorothioate
  modified_base 9: mod_base = OTHER; note = backbone modification: 5'-phosphorothioate; note = sugar modification: 2'-O-methoxyethylribose; note = thymine
  modified_base 10: mod_base = OTHER; note = sugar modification: 2'-O-methoxyethylribose; note = backbone modification: 5'-phosphorothioate
  modified_base 11: mod_base = OTHER; mod_base = m5c; note = backbone modification: 5'-phosphorothioate; note = sugar modification: 2'-O-methoxyethylribose
  modified_base 12: mod_base = OTHER; note = thymine; note = sugar modification: 2'-O-methoxyethylribose; note = backbone modification: 5'-phosphorothioate
  modified_base 13: mod_base = OTHER; note = sugar modification: 2'-O-methoxyethylribose; note = backbone modification: 5'-phosphorothioate; note = thymine
  modified_base 14: mod_base = OTHER; mod_base = m5c; note = sugar modification: 2'-O-methoxyethylribose; note = backbone modification: 5'-phosphorothioate
  modified_base 15: mod_base = OTHER; note = sugar modification: 2'-O-methoxyethylribose; note = backbone modification: 5'-phosphorothioate
  modified_base 16: mod_base = OTHER; note = sugar modification: 2'-O-methoxyethylribose; note = backbone modification: 5'-phosphorothioate; note = thymine
  modified_base 17: mod_base = OTHER; mod_base = m5c; note = sugar modification: lna; note = backbone modification: 5'-phosphorothioate
  modified_base 18: mod_base = m5c; mod_base = OTHER; note = sugar modification: lna
tgttcttgtacttcatcc

SEQ ID NO: 574 - RNA, 18 nt, synthetic construct
  source 1..18: mol_type = other RNA; note = Antisense oligonucleotide
  modified_base 1: mod_base = OTHER; note = sugar modification: lna; note = thymine; note = backbone modification: 5'-phosphorothioate
  modified_base 2: mod_base = OTHER; note = sugar modification: lna; note = backbone modification: 5'-phosphorothioate
  modified_base 3: mod_base = OTHER; note = thymine; note = sugar modification: 2'-O-methoxyethylribose; note = backbone modification: 5'-phosphorothioate
  modified_base 4: mod_base = OTHER; note = backbone modification: 5'-phosphorothioate; note = sugar modification: 2'-O-methoxyethylribose; note = thymine
  modified_base 5: mod_base = m5c; mod_base = OTHER; note = backbone modification: 5'-phosphorothioate; note = sugar modification: 2'-O-methoxyethylribose
  modified_base 6: mod_base = OTHER; note = sugar modification: 2'-O-methoxyethylribose; note = thymine; note = backbone modification: 5'-phosphorothioate
  modified_base 7: mod_base = OTHER; note = backbone modification: 5'-phosphorothioate; note = thymine; note = sugar modification: 2'-O-methoxyethylribose
  modified_base 8: mod_base = OTHER; note = sugar modification: 2'-O-methoxyethylribose; note = backbone modification: 5'-phosphorothioate
  modified_base 9: mod_base = OTHER; note = backbone modification: 5'-phosphorothioate; note = sugar modification: 2'-O-methoxyethylribose; note = thymine
  modified_base 10: mod_base = OTHER; note = backbone modification: 5'-phosphorothioate; note = sugar modification: 2'-O-methoxyethylribose
  modified_base 11: mod_base = m5c; mod_base = OTHER; note = sugar modification: 2'-O-methoxyethylribose; note = backbone modification: 5'-phosphorothioate
  modified_base 12: mod_base = OTHER; note = sugar modification: 2'-O-methoxyethylribose; note = thymine; note = backbone modification: 5'-phosphorothioate
  modified_base 13: mod_base = OTHER; note = thymine; note = backbone modification: 5'-phosphorothioate; note = sugar modification: 2'-O-methoxyethylribose
  modified_base 14: mod_base = m5c; mod_base = OTHER; note = backbone modification: 5'-phosphorothioate; note = sugar modification: 2'-O-methoxyethylribose
  modified_base 15: mod_base = OTHER; note = sugar modification: 2'-O-methoxyethylribose; note = backbone modification: 5'-phosphorothioate
  modified_base 16: mod_base = OTHER; note = backbone modification: 5'-phosphorothioate; note = sugar modification: 2'-O-methoxyethylribose; note = thymine
  modified_base 17: mod_base = OTHER; mod_base = m5c; note = sugar modification: 2'-O-methoxyethylribose; note = backbone modification: 5'-phosphorothioate
  modified_base 18: mod_base = OTHER; mod_base = m5c; note = sugar modification: lna
tgttcttgtacttcatcc

SEQ ID NO: 575 - RNA, 14 nt, synthetic construct
  source 1..14: mol_type = other RNA; note = Antisense oligonucleotide
  modified_base 1: mod_base = OTHER; note = backbone modification: 5'-phosphorothioate; note = thymine; note = sugar modification: 2'-O-methoxyethylribose
  modified_base 2: mod_base = OTHER; note = backbone modification: 5'-phosphorothioate; note = sugar modification: 2'-O-methoxyethylribose
  modified_base 3: mod_base = OTHER; note = thymine; note = sugar modification: 2'-O-methoxyethylribose; note = backbone modification: 5'-phosphorothioate
  modified_base 4: mod_base = OTHER; note = backbone modification: 5'-phosphorothioate; note = sugar modification: 2'-O-methoxyethylribose
  modified_base 5: mod_base = OTHER; mod_base = m5c; note = backbone modification: 5'-phosphorothioate; note = sugar modification: 2'-O-methoxyethylribose
  modified_base 6: mod_base = OTHER; note = sugar modification: 2'-O-methoxyethylribose; note = backbone modification: 5'-phosphorothioate; note = thymine
  modified_base 7: mod_base = OTHER; note = sugar modification: 2'-O-methoxyethylribose; note = thymine; note = backbone modification: 5'-phosphorothioate
  modified_base 8: mod_base = OTHER; mod_base = m5c; note = sugar modification: 2'-O-methoxyethylribose; note = backbone modification: 5'-phosphorothioate
  modified_base 9: mod_base = OTHER; note = backbone modification: 5'-phosphorothioate; note = sugar modification: 2'-O-methoxyethylribose
  modified_base 10: mod_base = OTHER; note = thymine; note = sugar modification: 2'-O-methoxyethylribose; note = backbone modification: 5'-phosphorothioate
  modified_base 11: mod_base = OTHER; mod_base = m5c; note = sugar modification: 2'-O-methoxyethylribose; note = backbone modification: 5'-phosphorothioate
  modified_base 12: mod_base = m5c; mod_base = OTHER; note = backbone modification: 5'-phosphorothioate; note = sugar modification: 2'-O-methoxyethylribose
  modified_base 13: mod_base = OTHER; mod_base = m5c; note = sugar modification: 2'-O-methoxyethylribose; note = backbone modification: 5'-phosphorothioate
  modified_base 14: mod_base = OTHER; note = sugar modification: 2'-O-methoxyethylribose
tgtacttcatccca

SEQ ID NO: 576 - RNA, 14 nt, synthetic construct
  source 1..14: mol_type = other RNA; note = Antisense oligonucleotide
  modified_base 1: mod_base = OTHER; note = sugar modification: 2'-O-methoxyethylribose; note = backbone modification: 5'-phosphorothioate; note = thymine
  modified_base 2: mod_base = OTHER; note = backbone modification: 5'-phosphorothioate; note = sugar modification: 2'-O-methoxyethylribose; note = thymine
  modified_base 3: mod_base = OTHER; note = sugar modification: 2'-O-methoxyethylribose; note = backbone modification: 5'-phosphorothioate
  modified_base 4: mod_base = OTHER; note = sugar modification: 2'-O-methoxyethylribose; note = backbone modification: 5'-phosphorothioate; note = thymine
  modified_base 5: mod_base = OTHER; note = sugar modification: 2'-O-methoxyethylribose; note = backbone modification: 5'-phosphorothioate
  modified_base 6: mod_base = OTHER; mod_base = m5c; note = sugar modification: 2'-O-methoxyethylribose; note = backbone modification: 5'-phosphorothioate
  modified_base 7: mod_base = OTHER; note = sugar modification: 2'-O-methoxyethylribose; note = backbone modification: 5'-phosphorothioate; note = thymine
  modified_base 8: mod_base = OTHER; note = thymine; note = backbone modification: 5'-phosphorothioate; note = sugar modification: 2'-O-methoxyethylribose
  modified_base 9: mod_base = m5c; mod_base = OTHER; note = sugar modification: 2'-O-methoxyethylribose; note = backbone modification: 5'-phosphorothioate
  modified_base 10: mod_base = OTHER; note = sugar modification: 2'-O-methoxyethylribose; note = backbone modification: 5'-phosphorothioate
  modified_base 11: mod_base = OTHER; note = thymine; note = backbone modification: 5'-phosphorothioate; note = sugar modification: 2'-O-methoxyethylribose
  modified_base 12: mod_base = m5c; mod_base = OTHER; note = backbone modification: 5'-phosphorothioate; note = sugar modification: 2'-O-methoxyethylribose
  modified_base 13: mod_base = m5c; mod_base = OTHER; note = sugar modification: 2'-O-methoxyethylribose; note = backbone modification: 5'-phosphorothioate
  modified_base 14: mod_base = m5c; mod_base = OTHER; note = sugar modification: 2'-O-methoxyethylribose
ttgtacttcatccc

SEQ ID NO: 577 - RNA, 14 nt, synthetic construct
  source 1..14: mol_type = other RNA; note = Antisense oligonucleotide
  modified_base 1: mod_base = OTHER; mod_base = m5c; note = sugar modification: 2'-O-methoxyethylribose; note = backbone modification: 5'-phosphorothioate
  modified_base 2: mod_base = OTHER; note = sugar modification: 2'-O-methoxyethylribose; note = backbone modification: 5'-phosphorothioate; note = thymine
  modified_base 3: mod_base = OTHER; note = thymine; note = backbone modification: 5'-phosphorothioate; note = sugar modification: 2'-O-methoxyethylribose
  modified_base 4: mod_base = OTHER; note = backbone modification: 5'-phosphorothioate; note = sugar modification: 2'-O-methoxyethylribose
  modified_base 5: mod_base = OTHER; note = sugar modification: 2'-O-methoxyethylribose; note = thymine; note = backbone modification: 5'-phosphorothioate
  modified_base 6: mod_base = OTHER; note = sugar modification: 2'-O-methoxyethylribose; note = backbone modification: 5'-phosphorothioate
  modified_base 7: mod_base = OTHER; mod_base = m5c; note = backbone modification: 5'-phosphorothioate; note = sugar modification: 2'-O-methoxyethylribose
  modified_base 8: mod_base = OTHER; note = backbone modification: 5'-phosphorothioate; note = thymine; note = sugar modification: 2'-O-methoxyethylribose
  modified_base 9: mod_base = OTHER; note = backbone modification: 5'-phosphorothioate; note = thymine; note = sugar modification: 2'-O-methoxyethylribose
  modified_base 10: mod_base = OTHER; mod_base = m5c; note = sugar modification: 2'-O-methoxyethylribose; note = backbone modification: 5'-phosphorothioate
  modified_base 11: mod_base = OTHER; note = sugar modification: 2'-O-methoxyethylribose; note = backbone modification: 5'-phosphorothioate
  modified_base 12: mod_base = OTHER; note = sugar modification: 2'-O-methoxyethylribose; note = backbone modification: 5'-phosphorothioate; note = thymine
  modified_base 13: mod_base = m5c; mod_base = OTHER; note = sugar modification: 2'-O-methoxyethylribose; note = backbone modification: 5'-phosphorothioate
  modified_base 14: mod_base = OTHER; mod_base = m5c; note = sugar modification: 2'-O-methoxyethylribose
cttgtacttcatcc

SEQ ID NO: 578 - RNA, 14 nt, synthetic construct
  source 1..14: mol_type = other RNA; note = Antisense oligonucleotide
  modified_base 1: mod_base = OTHER; note = backbone modification: 5'-phosphorothioate; note = thymine; note = sugar modification: 2'-O-methoxyethylribose
  modified_base 2: mod_base = OTHER; mod_base = m5c; note = backbone modification: 5'-phosphorothioate; note = sugar modification: 2'-O-methoxyethylribose
  modified_base 3: mod_base = OTHER; note = backbone modification: 5'-phosphorothioate; note = thymine; note = sugar modification: 2'-O-methoxyethylribose
  modified_base 4: mod_base = OTHER; note = sugar modification: 2'-O-methoxyethylribose; note = backbone modification: 5'-phosphorothioate; note = thymine
  modified_base 5: mod_base = OTHER; note = sugar modification: 2'-O-methoxyethylribose; note = backbone modification: 5'-phosphorothioate
  modified_base 6: mod_base = OTHER; note = sugar modification: 2'-O-methoxyethylribose; note = backbone modification: 5'-phosphorothioate; note = thymine
  modified_base 7: mod_base = OTHER; note = backbone modification: 5'-phosphorothioate; note = sugar modification: 2'-O-methoxyethylribose
  modified_base 8: mod_base = OTHER; mod_base = m5c; note = sugar modification: 2'-O-methoxyethylribose; note = backbone modification: 5'-phosphorothioate
  modified_base 9: mod_base = OTHER; note = backbone modification: 5'-phosphorothioate; note = thymine; note = sugar modification: 2'-O-methoxyethylribose
  modified_base 10: mod_base = OTHER; note = sugar modification: 2'-O-methoxyethylribose; note = backbone modification: 5'-phosphorothioate; note = thymine
  modified_base 11: mod_base = m5c; mod_base = OTHER; note = sugar modification: 2'-O-methoxyethylribose; note = backbone modification: 5'-phosphorothioate
  modified_base 12: mod_base = OTHER; note = backbone modification: 5'-phosphorothioate; note = sugar modification: 2'-O-methoxyethylribose
  modified_base 13: mod_base = OTHER; note = backbone modification: 5'-phosphorothioate; note = sugar modification: 2'-O-methoxyethylribose; note = thymine
  modified_base 14: mod_base = OTHER; mod_base = m5c; note = sugar modification: 2'-O-methoxyethylribose
tcttgtacttcatc

SEQ ID NO: 579 - RNA, 14 nt, synthetic construct
  source 1..14: mol_type = other RNA; note = Antisense oligonucleotide
  modified_base 1: mod_base = OTHER; note = backbone modification: 5'-phosphorothioate; note = sugar modification: 2'-O-methoxyethylribose
  modified_base 2: mod_base = OTHER; note = sugar modification: 2'-O-methoxyethylribose; note = thymine; note = backbone modification: 5'-phosphorothioate
  modified_base 3: mod_base = OTHER; note = sugar modification: 2'-O-methoxyethylribose; note = backbone modification: 5'-phosphorothioate; note = thymine
  modified_base 4: mod_base = m5c; mod_base = OTHER; note = sugar modification: 2'-O-methoxyethylribose; note = backbone modification: 5'-phosphorothioate
  modified_base 5: mod_base = OTHER; note = sugar modification: 2'-O-methoxyethylribose; note = backbone modification: 5'-phosphorothioate; note = thymine
  modified_base 6: mod_base = OTHER; note = sugar modification: 2'-O-methoxyethylribose; note = thymine; note = backbone modification: 5'-phosphorothioate
  modified_base 7: mod_base = OTHER; note = sugar modification: 2'-O-methoxyethylribose; note = backbone modification: 5'-phosphorothioate
  modified_base 8: mod_base = OTHER; note = backbone modification: 5'-phosphorothioate; note = thymine; note = sugar modification: 2'-O-methoxyethylribose
  modified_base 9: mod_base = OTHER; note = backbone modification: 5'-phosphorothioate; note = sugar modification: 2'-O-methoxyethylribose
  modified_base 10: mod_base = OTHER; mod_base = m5c; note = sugar modification: 2'-O-methoxyethylribose; note = backbone modification: 5'-phosphorothioate
  modified_base 11: mod_base = OTHER; note = thymine; note = sugar modification: 2'-O-methoxyethylribose; note = backbone modification: 5'-phosphorothioate
  modified_base 12: mod_base = OTHER; note = backbone modification: 5'-phosphorothioate; note = sugar modification: 2'-O-methoxyethylribose; note = thymine
  modified_base 13: mod_base = m5c; mod_base = OTHER; note = sugar modification: 2'-O-methoxyethylribose; note = backbone modification: 5'-phosphorothioate
  modified_base 14: mod_base = OTHER; note = sugar modification: 2'-O-methoxyethylribose
gttcttgtacttca

SEQ ID NO: 580 - RNA, 14 nt, synthetic construct
  source 1..14: mol_type = other RNA; note = Antisense oligonucleotide
  modified_base 1: mod_base = OTHER; note = backbone modification: 5'-phosphorothioate; note = sugar modification: 2'-O-methoxyethylribose
  modified_base 2: mod_base = OTHER; note = thymine; note = backbone modification: 5'-phosphorothioate; note = sugar modification: 2'-O-methoxyethylribose
  modified_base 3: mod_base = OTHER; note = backbone modification: 5'-phosphorothioate; note = sugar modification: 2'-O-methoxyethylribose
  modified_base 4: mod_base = OTHER; note = backbone modification: 5'-phosphorothioate; note = thymine; note = sugar modification: 2'-O-methoxyethylribose
  modified_base 5: mod_base = OTHER; note = thymine; note = sugar modification: 2'-O-methoxyethylribose; note = backbone modification: 5'-phosphorothioate
  modified_base 6: mod_base = OTHER; mod_base = m5c; note = backbone modification: 5'-phosphorothioate; note = sugar modification: 2'-O-methoxyethylribose
  modified_base 7: mod_base = OTHER; note = thymine; note = backbone modification: 5'-phosphorothioate; note = sugar modification: 2'-O-methoxyethylribose
  modified_base 8: mod_base = OTHER; note = sugar modification: 2'-O-methoxyethylribose; note = thymine; note = backbone modification: 5'-phosphorothioate
  modified_base 9: mod_base = OTHER; note = sugar modification: 2'-O-methoxyethylribose; note = backbone modification: 5'-phosphorothioate
  modified_base 10: mod_base = OTHER; note = sugar modification: 2'-O-methoxyethylribose; note = thymine; note = backbone modification: 5'-phosphorothioate
  modified_base 11: mod_base = OTHER; note = backbone modification: 5'-phosphorothioate; note = sugar modification: 2'-O-methoxyethylribose
  modified_base 12: mod_base = OTHER; mod_base = m5c; note = sugar modification: 2'-O-methoxyethylribose; note = backbone modification: 5'-phosphorothioate
  modified_base 13: mod_base = OTHER; note = sugar modification: 2'-O-methoxyethylribose; note = thymine; note = backbone modification: 5'-phosphorothioate
  modified_base 14: mod_base = OTHER; note = thymine; note = sugar modification: 2'-O-methoxyethylribose
gtgttcttgtactt

SEQ ID NO: 581 - RNA, 14 nt, synthetic construct
  source 1..14: mol_type = other RNA; note = Antisense oligonucleotide
  modified_base 1: mod_base = OTHER; note = backbone modification: 5'-phosphorothioate; note = sugar modification: 2'-O-methoxyethylribose
  modified_base 2: mod_base = OTHER; note = backbone modification: 5'-phosphorothioate; note = sugar modification: 2'-O-methoxyethylribose
  modified_base 3: mod_base = OTHER; note = sugar modification: 2'-O-methoxyethylribose; note = backbone modification: 5'-phosphorothioate
  modified_base 4: mod_base = OTHER; note = backbone modification: 5'-phosphorothioate; note = sugar modification: 2'-O-methoxyethylribose; note = thymine
  modified_base 5: mod_base = OTHER; note = sugar modification: 2'-O-methoxyethylribose; note = backbone modification: 5'-phosphorothioate
  modified_base 6: mod_base = OTHER; note = backbone modification: 5'-phosphorothioate; note = thymine; note = sugar modification: 2'-O-methoxyethylribose
  modified_base 7: mod_base = OTHER; note = backbone modification: 5'-phosphorothioate; note = sugar modification: 2'-O-methoxyethylribose; note = thymine
  modified_base 8: mod_base = m5c; mod_base = OTHER; note = backbone modification: 5'-phosphorothioate; note = sugar modification: 2'-O-methoxyethylribose
  modified_base 9: mod_base = OTHER; note = backbone modification: 5'-phosphorothioate; note = thymine; note = sugar modification: 2'-O-methoxyethylribose
  modified_base 10: mod_base = OTHER; note = backbone modification: 5'-phosphorothioate; note = sugar modification: 2'-O-methoxyethylribose; note = thymine
  modified_base 11: mod_base = OTHER; note = sugar modification: 2'-O-methoxyethylribose; note = backbone modification: 5'-phosphorothioate
  modified_base 12: mod_base = OTHER; note = thymine; note = sugar modification: 2'-O-methoxyethylribose; note = backbone modification: 5'-phosphorothioate
  modified_base 13: mod_base = OTHER; note = backbone modification: 5'-phosphorothioate; note = sugar modification: 2'-O-methoxyethylribose
  modified_base 14: mod_base = OTHER; mod_base = m5c; note = sugar modification: 2'-O-methoxyethylribose
aggtgttcttgtac

SEQ ID NO: 582 - RNA, 14 nt, synthetic construct
  source 1..14: mol_type = other RNA; note = Antisense oligonucleotide
  modified_base 1: mod_base = OTHER; note = backbone modification: 5'-phosphorothioate; note = sugar modification: 2'-O-methoxyethylribose
  modified_base 2: mod_base = OTHER; note = sugar modification: 2'-O-methoxyethylribose; note = backbone modification: 5'-phosphorothioate
  modified_base 3: mod_base = OTHER; note = sugar modification: 2'-O-methoxyethylribose; note = backbone modification: 5'-phosphorothioate
  modified_base 4: mod_base = OTHER; note = sugar modification: 2'-O-methoxyethylribose; note = backbone modification: 5'-phosphorothioate
  modified_base 5: mod_base = OTHER; note = sugar modification: 2'-O-methoxyethylribose; note = thymine; note = backbone modification: 5'-phosphorothioate
  modified_base 6: mod_base = OTHER; note = sugar modification: 2'-O-methoxyethylribose; note = backbone modification: 5'-phosphorothioate
  modified_base 7: mod_base = OTHER; note = thymine; note = backbone modification: 5'-phosphorothioate; note = sugar modification: 2'-O-methoxyethylribose
  modified_base 8: mod_base = OTHER; note = sugar modification: 2'-O-methoxyethylribose; note = thymine; note = backbone modification: 5'-phosphorothioate
  modified_base 9: mod_base = m5c; mod_base = OTHER; note = sugar modification: 2'-O-methoxyethylribose; note = backbone modification: 5'-phosphorothioate
  modified_base 10: mod_base = OTHER; note = backbone modification: 5'-phosphorothioate; note = sugar modification: 2'-O-methoxyethylribose; note = thymine
  modified_base 11: mod_base = OTHER; note = backbone modification: 5'-phosphorothioate; note = thymine; note = sugar modification: 2'-O-methoxyethylribose
  modified_base 12: mod_base = OTHER; note = sugar modification: 2'-O-methoxyethylribose; note = backbone modification: 5'-phosphorothioate
  modified_base 13: mod_base = OTHER; note = backbone modification: 5'-phosphorothioate; note = thymine; note = sugar modification: 2'-O-methoxyethylribose
  modified_base 14: mod_base = OTHER; note = sugar modification: 2'-O-methoxyethylribose
aaggtgttcttgta

SEQ ID NO: 583 - RNA, 14 nt, synthetic construct
  source 1..14: mol_type = other RNA; note = Antisense oligonucleotide
  modified_base 1: mod_base = OTHER; note = sugar modification: lna; note = thymine; note = backbone modification: 5'-phosphorothioate
  modified_base 2: mod_base = OTHER; note = sugar modification: lna; note = backbone modification: 5'-phosphorothioate
  modified_base 3: mod_base = OTHER; note = backbone modification: 5'-phosphorothioate; note = thymine; note = sugar modification: lna
  modified_base 4: mod_base = OTHER; note = sugar modification: 2'-O-methoxyethylribose; note = backbone modification: 5'-phosphorothioate
  modified_base 5: mod_base = m5c; mod_base = OTHER; note = sugar modification: 2'-O-methoxyethylribose; note = backbone modification: 5'-phosphorothioate
  modified_base 6: mod_base = OTHER; note = thymine; note = backbone modification: 5'-phosphorothioate; note = sugar modification: 2'-O-methoxyethylribose
  modified_base 7: mod_base = OTHER; note = sugar modification: 2'-O-methoxyethylribose; note = thymine; note = backbone modification: 5'-phosphorothioate
  modified_base 8: mod_base = m5c; mod_base = OTHER; note = backbone modification: 5'-phosphorothioate; note = sugar modification: 2'-O-methoxyethylribose
  modified_base 9: mod_base = OTHER; note = sugar modification: 2'-O-methoxyethylribose; note = backbone modification: 5'-phosphorothioate
  modified_base 10: mod_base = OTHER; note = thymine; note = sugar modification: 2'-O-methoxyethylribose; note = backbone modification: 5'-phosphorothioate
  modified_base 11: mod_base = m5c; mod_base = OTHER; note = sugar modification: 2'-O-methoxyethylribose; note = backbone modification: 5'-phosphorothioate
  modified_base 12: mod_base = OTHER; mod_base = m5c; note = backbone modification: 5'-phosphorothioate; note = sugar modification: lna
  modified_base 13: mod_base = OTHER; mod_base = m5c; note = sugar modification: lna; note = backbone modification: 5'-phosphorothioate
  modified_base 14: mod_base = OTHER; note = sugar modification: lna
tgtacttcatccca

SEQ ID NO: 584 - RNA, 14 nt, synthetic construct
  source 1..14: mol_type = other RNA; note = Antisense oligonucleotide
  modified_base 1: mod_base = OTHER; note = sugar modification: lna; note = thymine; note = backbone modification: 5'-phosphorothioate
  modified_base 2: mod_base = OTHER; note = backbone modification: 5'-phosphorothioate; note = thymine; note = sugar modification: lna
  modified_base 3: mod_base = OTHER; note = sugar modification: lna; note = backbone modification: 5'-phosphorothioate
  modified_base 4: mod_base = OTHER; note = backbone modification: 5'-phosphorothioate; note = sugar modification: 2'-O-methoxyethylribose; note = thymine
  modified_base 5: mod_base = OTHER; note = sugar modification: 2'-O-methoxyethylribose; note = backbone modification: 5'-phosphorothioate
  modified_base 6: mod_base = m5c; mod_base = OTHER; note = sugar modification: 2'-O-methoxyethylribose; note = backbone modification: 5'-phosphorothioate
  modified_base 7: mod_base = OTHER; note = thymine; note = sugar modification: 2'-O-methoxyethylribose; note = backbone modification: 5'-phosphorothioate
  modified_base 8: mod_base = OTHER; note = backbone modification: 5'-phosphorothioate; note = thymine; note = sugar modification: 2'-O-methoxyethylribose
  modified_base 9: mod_base = OTHER; mod_base = m5c; note = sugar modification: 2'-O-methoxyethylribose; note = backbone modification: 5'-phosphorothioate
  modified_base 10: mod_base = OTHER; note = backbone modification: 5'-phosphorothioate; note = sugar modification: 2'-O-methoxyethylribose
  modified_base 11: mod_base = OTHER; note = sugar modification: 2'-O-methoxyethylribose; note = thymine; note = backbone modification: 5'-phosphorothioate
  modified_base 12: mod_base = m5c; mod_base = OTHER; note = sugar modification: lna; note = backbone modification: 5'-phosphorothioate
  modified_base 13: mod_base = m5c; mod_base = OTHER; note = backbone modification: 5'-phosphorothioate; note = sugar modification: lna
  modified_base 14: mod_base = m5c; mod_base = OTHER; note = sugar modification: lna
ttgtacttcatccc

SEQ ID NO: 585 - RNA, 14 nt, synthetic construct
  source 1..14: mol_type = other RNA; note = Antisense oligonucleotide
  modified_base 1: mod_base = OTHER; mod_base = m5c; note = sugar modification: lna; note = backbone modification: 5'-phosphorothioate
  modified_base 2: mod_base = OTHER; note = backbone modification: 5'-phosphorothioate; note = sugar modification: lna; note = thymine
  modified_base 3: mod_base = OTHER; note = backbone modification: 5'-phosphorothioate; note = thymine; note = sugar modification: lna
  modified_base 4: mod_base = OTHER; note = backbone modification: 5'-phosphorothioate; note = sugar modification: 2'-O-methoxyethylribose
  modified_base 5: mod_base = OTHER; note = sugar modification: 2'-O-methoxyethylribose; note = backbone modification: 5'-phosphorothioate; note = thymine
  modified_base 6: mod_base = OTHER; note = sugar modification: 2'-O-methoxyethylribose; note = backbone modification: 5'-phosphorothioate
  modified_base 7: mod_base = m5c; mod_base = OTHER; note = backbone modification: 5'-phosphorothioate; note = sugar modification: 2'-O-methoxyethylribose
  modified_base 8: mod_base = OTHER; note = backbone modification: 5'-phosphorothioate; note = thymine; note = sugar modification: 2'-O-methoxyethylribose
  modified_base 9: mod_base = OTHER; note = backbone modification: 5'-phosphorothioate; note = sugar modification: 2'-O-methoxyethylribose; note = thymine
  modified_base 10: mod_base = OTHER; mod_base = m5c; note = backbone modification: 5'-phosphorothioate; note = sugar modification: 2'-O-methoxyethylribose
  modified_base 11: mod_base = OTHER; note = backbone modification: 5'-phosphorothioate; note = sugar modification: 2'-O-methoxyethylribose
  modified_base 12: mod_base = OTHER; note = backbone modification: 5'-phosphorothioate; note = thymine; note = sugar modification: lna
  modified_base 13: mod_base = OTHER; mod_base = m5c; note = backbone modification: 5'-phosphorothioate; note = sugar modification: lna
  modified_base 14: mod_base = OTHER; mod_base = m5c; note = sugar modification: lna
cttgtacttcatcc

SEQ ID NO: 586 - RNA, 14 nt, synthetic construct
  source 1..14: mol_type = other RNA; note = Antisense oligonucleotide
  modified_base 1: mod_base = OTHER; note = thymine; note = backbone modification: 5'-phosphorothioate; note = sugar modification: lna
  modified_base 2: mod_base = OTHER; mod_base = m5c; note = backbone modification: 5'-phosphorothioate; note = sugar modification: lna
  modified_base 3: mod_base = OTHER; note = sugar modification: lna; note = backbone modification: 5'-phosphorothioate; note = thymine
  modified_base 4: mod_base = OTHER; note = sugar modification: 2'-O-methoxyethylribose; note = thymine; note = backbone modification: 5'-phosphorothioate
  modified_base 5: mod_base = OTHER; note = backbone modification: 5'-phosphorothioate; note = sugar modification: 2'-O-methoxyethylribose
  modified_base 6: mod_base = OTHER; note = thymine; note = sugar modification: 2'-O-methoxyethylribose; note = backbone modification: 5'-phosphorothioate
  modified_base 7: mod_base = OTHER; note = backbone modification: 5'-phosphorothioate; note = sugar modification: 2'-O-methoxyethylribose
  modified_base 8: mod_base = OTHER; mod_base = m5c; note = backbone modification: 5'-phosphorothioate; note = sugar modification: 2'-O-methoxyethylribose
  modified_base 9: mod_base = OTHER; note = thymine; note = sugar modification: 2'-O-methoxyethylribose; note = backbone modification: 5'-phosphorothioate
  modified_base 10: mod_base = OTHER; note = sugar modification: 2'-O-methoxyethylribose; note = backbone modification: 5'-phosphorothioate; note = thymine
  modified_base 11: mod_base = m5c; mod_base = OTHER; note = sugar modification: 2'-O-methoxyethylribose; note = backbone modification: 5'-phosphorothioate
  modified_base 12: mod_base = OTHER; note = sugar modification: lna; note = backbone modification: 5'-phosphorothioate
  modified_base 13: mod_base = OTHER; note = sugar modification: lna; note = thymine; note = backbone modification: 5'-phosphorothioate
  modified_base 14: mod_base = OTHER; mod_base = m5c; note = sugar modification: lna
tcttgtacttcatc

SEQ ID NO: 587 - RNA, 14 nt, synthetic construct
  source 1..14: mol_type = other RNA; note = Antisense oligonucleotide
  modified_base 1: mod_base = OTHER; note = backbone modification: 5'-phosphorothioate; note = sugar modification: lna
  modified_base 2: mod_base = OTHER; note = thymine; note = backbone modification: 5'-phosphorothioate; note = sugar modification: lna
  modified_base 3: mod_base = OTHER; note = thymine; note = backbone modification: 5'-phosphorothioate; note = sugar modification: lna
  modified_base 4: mod_base = m5c; mod_base = OTHER; note = backbone modification: 5'-phosphorothioate; note = sugar modification: 2'-O-methoxyethylribose
  modified_base 5: mod_base = OTHER; note = sugar modification: 2'-O-methoxyethylribose; note = backbone modification: 5'-phosphorothioate; note = thymine
  modified_base 6: mod_base = OTHER; note = backbone modification: 5'-phosphorothioate; note = thymine; note = sugar modification: 2'-O-methoxyethylribose
  modified_base 7: mod_base = OTHER; note = backbone modification: 5'-phosphorothioate; note = sugar modification: 2'-O-methoxyethylribose
  modified_base 8: mod_base = OTHER; note = sugar modification: 2'-O-methoxyethylribose; note = backbone modification: 5'-phosphorothioate; note = thymine
  modified_base 9: mod_base = OTHER; note = backbone modification: 5'-phosphorothioate; note = sugar modification: 2'-O-methoxyethylribose
  modified_base 10: mod_base = m5c; mod_base = OTHER; note = backbone modification: 5'-phosphorothioate; note = sugar modification: 2'-O-methoxyethylribose
  modified_base 11: mod_base = OTHER; note = thymine; note = sugar modification: 2'-O-methoxyethylribose; note = backbone modification: 5'-phosphorothioate
  modified_base 12: mod_base = OTHER; note = sugar modification: lna; note = thymine; note = backbone modification: 5'-phosphorothioate
  modified_base 13: mod_base = OTHER; mod_base = m5c; note = backbone modification: 5'-phosphorothioate; note = sugar modification: lna
  modified_base 14: mod_base = OTHER; note = sugar modification: lna
gttcttgtacttca

SEQ ID NO: 588 - RNA, 14 nt, synthetic construct
  source 1..14: mol_type = other RNA; note = Antisense oligonucleotide
  modified_base 1: mod_base = OTHER; note = backbone modification: 5'-phosphorothioate; note = sugar modification: lna
  modified_base 2: mod_base = OTHER; note = thymine; note = sugar modification: lna; note = backbone modification: 5'-phosphorothioate
  modified_base 3: mod_base = OTHER; note = sugar modification: lna; note = backbone modification: 5'-phosphorothioate
  modified_base 4: mod_base = OTHER; note = sugar modification: 2'-O-methoxyethylribose; note = thymine; note = backbone modification: 5'-phosphorothioate
  modified_base 5: mod_base = OTHER; note = backbone modification: 5'-phosphorothioate; note = thymine; note = sugar modification: 2'-O-methoxyethylribose
  modified_base 6: mod_base = m5c; mod_base = OTHER; note = sugar modification: 2'-O-methoxyethylribose; note = backbone modification: 5'-phosphorothioate
  modified_base 7: mod_base = OTHER; note = sugar modification: 2'-O-methoxyethylribose; note = backbone modification: 5'-phosphorothioate; note = thymine
  modified_base 8: mod_base = OTHER; note = sugar modification: 2'-O-methoxyethylribose; note = backbone modification: 5'-phosphorothioate; note = thymine
  modified_base 9: mod_base = OTHER; note = sugar modification: 2'-O-methoxyethylribose; note = backbone modification: 5'-phosphorothioate
  modified_base 10: mod_base = OTHER; note = sugar modification: 2'-O-methoxyethylribose; note = thymine; note = backbone modification: 5'-phosphorothioate
  modified_base 11: mod_base = OTHER; note = backbone modification: 5'-phosphorothioate; note = sugar modification: 2'-O-methoxyethylribose
  modified_base 12: mod_base = m5c; mod_base = OTHER; note = sugar modification: lna; note = backbone modification: 5'-phosphorothioate
  modified_base 13: mod_base = OTHER; note = backbone modification: 5'-phosphorothioate; note = thymine; note = sugar modification: lna
  modified_base 14: mod_base = OTHER; note = sugar modification: lna; note = thymine
gtgttcttgtactt

SEQ ID NO: 589 - RNA, 14 nt, synthetic construct
  source 1..14: mol_type = other RNA; note = Antisense oligonucleotide
  modified_base 1: mod_base = OTHER; note = backbone modification: 5'-phosphorothioate; note = sugar modification: lna
  modified_base 2: mod_base = OTHER; note = sugar modification: lna; note = backbone modification: 5'-phosphorothioate
  modified_base 3: mod_base = OTHER; note = backbone modification: 5'-phosphorothioate; note = sugar modification: lna
  modified_base 4: mod_base = OTHER; note = sugar modification: 2'-O-methoxyethylribose; note = thymine; note = backbone modification: 5'-phosphorothioate
  modified_base 5: mod_base = OTHER; note = backbone modification: 5'-phosphorothioate; note = sugar modification: 2'-O-methoxyethylribose
  modified_base 6: mod_base = OTHER; note = backbone modification: 5'-phosphorothioate; note = sugar modification: 2'-O-methoxyethylribose; note = thymine
  modified_base 7: mod_base = OTHER; note = thymine; note = backbone modification: 5'-phosphorothioate; note = sugar modification: 2'-O-methoxyethylribose
  modified_base 8: mod_base = m5c; mod_base = OTHER; note = sugar modification: 2'-O-methoxyethylribose; note = backbone modification: 5'-phosphorothioate
  modified_base 9: mod_base = OTHER; note = backbone modification: 5'-phosphorothioate; note = thymine; note = sugar modification: 2'-O-methoxyethylribose
  modified_base 10: mod_base = OTHER; note = sugar modification: 2'-O-methoxyethylribose; note = backbone modification: 5'-phosphorothioate; note = thymine
  modified_base 11: mod_base = OTHER; note = backbone modification: 5'-phosphorothioate; note = sugar modification: 2'-O-methoxyethylribose
  modified_base 12: mod_base = OTHER; note = sugar modification: lna; note = backbone modification: 5'-phosphorothioate; note = thymine
  modified_base 13: mod_base = OTHER; note = backbone modification: 5'-phosphorothioate; note = sugar modification: lna
  modified_base 14: mod_base = m5c; mod_base = OTHER; note = sugar modification: lna
aggtgttcttgtac

SEQ ID NO: 590 - RNA, 14 nt, synthetic construct
  source 1..14: mol_type = other RNA; note = Antisense oligonucleotide
  modified_base 1: mod_base = OTHER; note = sugar modification: lna; note = backbone modification: 5'-phosphorothioate
  modified_base 2: mod_base = OTHER; note = backbone modification: 5'-phosphorothioate; note = sugar modification: lna
  modified_base 3: mod_base = OTHER; note = sugar modification: lna; note = backbone modification: 5'-phosphorothioate
  modified_base 4: mod_base = OTHER; note = sugar modification: 2'-O-methoxyethylribose; note = backbone modification: 5'-phosphorothioate
  modified_base 5: mod_base = OTHER; note = backbone modification: 5'-phosphorothioate; note = thymine; note = sugar modification: 2'-O-methoxyethylribose
  modified_base 6: mod_base = OTHER; note = backbone modification: 5'-phosphorothioate; note = sugar modification: 2'-O-methoxyethylribose
  modified_base 7: mod_base = OTHER; note = sugar modification: 2'-O-methoxyethylribose; note = thymine; note = backbone modification: 5'-phosphorothioate
  modified_base 8: mod_base = OTHER; note = sugar modification: 2'-O-methoxyethylribose; note = thymine; note = backbone modification: 5'-phosphorothioate
  modified_base 9: mod_base = OTHER; mod_base = m5c; note = sugar modification: 2'-O-methoxyethylribose; note = backbone modification: 5'-phosphorothioate
  modified_base 10: mod_base = OTHER; note = backbone modification: 5'-phosphorothioate; note = sugar modification: 2'-O-methoxyethylribose; note = thymine
  modified_base 11: mod_base = OTHER; note = thymine; note = sugar modification: 2'-O-methoxyethylribose; note = backbone modification: 5'-phosphorothioate
  modified_base 12: mod_base = OTHER; note = sugar modification: lna; note = backbone modification: 5'-phosphorothioate
  modified_base 13: mod_base = OTHER; note = thymine; note = sugar modification: lna; note = backbone modification: 5'-phosphorothioate
  modified_base 14: mod_base = OTHER; note = sugar modification: lna
aaggtgttcttgta

SEQ ID NO: 591 - RNA, 15 nt, synthetic construct
  source 1..15: mol_type = other RNA; note = Antisense oligonucleotide
  modified_base 1: mod_base = OTHER; note = sugar modification: 2'-O-methoxyethylribose; note = thymine; note = backbone modification: 5'-phosphorothioate
  modified_base 2: mod_base = OTHER; note = thymine; note = backbone modification: 5'-phosphorothioate; note = sugar modification: 2'-O-methoxyethylribose
  modified_base 3: mod_base = OTHER; note = backbone modification: 5'-phosphorothioate; note = sugar modification: 2'-O-methoxyethylribose
  modified_base 4: mod_base = OTHER; note = thymine; note = backbone modification: 5'-phosphorothioate; note = sugar modification: 2'-O-methoxyethylribose
  modified_base 5: mod_base = OTHER; note = backbone modification: 5'-phosphorothioate; note = sugar modification: 2'-O-methoxyethylribose
  modified_base 6: mod_base = OTHER; mod_base = m5c; note = backbone modification: 5'-phosphorothioate; note = sugar modification: 2'-O-methoxyethylribose
  modified_base 7: mod_base = OTHER; note = backbone modification: 5'-phosphorothioate; note = sugar modification: 2'-O-methoxyethylribose; note = thymine
  modified_base 8: mod_base = OTHER; note = thymine; note = backbone modification: 5'-phosphorothioate; note = sugar modification: 2'-O-methoxyethylribose
  modified_base 9: mod_base = m5c; mod_base = OTHER; note = backbone modification: 5'-phosphorothioate; note = sugar modification: 2'-O-methoxyethylribose
  modified_base 10: mod_base = OTHER; note = sugar modification: 2'-O-methoxyethylribose; note = backbone modification: 5'-phosphorothioate
  modified_base 11: mod_base = OTHER; note = backbone modification: 5'-phosphorothioate; note = sugar modification: 2'-O-methoxyethylribose; note = thymine
  modified_base 12: mod_base = OTHER; mod_base = m5c; note = backbone modification: 5'-phosphorothioate; note = sugar modification: 2'-O-methoxyethylribose
  modified_base 13: mod_base = OTHER; mod_base = m5c; note = sugar modification: 2'-O-methoxyethylribose; note = backbone modification: 5'-phosphorothioate
  modified_base 14: mod_base = OTHER; mod_base = m5c; note = sugar modification: 2'-O-methoxyethylribose; note = backbone modification: 5'-phosphorothioate
  modified_base 15: mod_base = OTHER; note = sugar modification: 2'-O-methoxyethylribose
ttgtacttcatccca

SEQ ID NO: 592 - RNA, 15 nt, synthetic construct
  source 1..15: mol_type = other RNA; note = Antisense oligonucleotide
  modified_base 1: mod_base = m5c; mod_base = OTHER; note = sugar modification: 2'-O-methoxyethylribose; note = backbone modification: 5'-phosphorothioate
  modified_base 2: mod_base = OTHER; note = sugar modification: 2'-O-methoxyethylribose; note = thymine; note = backbone modification: 5'-phosphorothioate
  modified_base 3: mod_base = OTHER; note = backbone modification: 5'-phosphorothioate; note = sugar modification: 2'-O-methoxyethylribose; note = thymine
  modified_base 4: mod_base = OTHER; note = backbone modification: 5'-phosphorothioate; note = sugar modification: 2'-O-methoxyethylribose
  modified_base 5: mod_base = OTHER; note = backbone modification: 5'-phosphorothioate; note = thymine; note = sugar modification: 2'-O-methoxyethylribose
  modified_base 6: mod_base = OTHER; note = backbone modification: 5'-phosphorothioate; note = sugar modification: 2'-O-methoxyethylribose
  modified_base 7: mod_base = m5c; mod_base = OTHER; note = backbone modification: 5'-phosphorothioate; note = sugar modification: 2'-O-methoxyethylribose
  modified_base 8: mod_base = OTHER; note = backbone modification: 5'-phosphorothioate; note = thymine; note = sugar modification: 2'-O-methoxyethylribose
  modified_base 9: mod_base = OTHER; note = sugar modification: 2'-O-methoxyethylribose; note = backbone modification: 5'-phosphorothioate; note = thymine
  modified_base 10: mod_base = OTHER; mod_base = m5c; note = backbone modification: 5'-phosphorothioate; note = sugar modification: 2'-O-methoxyethylribose
  modified_base 11: mod_base = OTHER; note = backbone modification: 5'-phosphorothioate; note = sugar modification: 2'-O-methoxyethylribose
  modified_base 12: mod_base = OTHER; note = sugar modification: 2'-O-methoxyethylribose; note = backbone modification: 5'-phosphorothioate; note = thymine
  modified_base 13: mod_base = OTHER; mod_base = m5c; note = backbone modification: 5'-phosphorothioate; note = sugar modification: 2'-O-methoxyethylribose
  modified_base 14: mod_base = m5c; mod_base = OTHER; note = backbone modification: 5'-phosphorothioate; note = sugar modification: 2'-O-methoxyethylribose
  modified_base 15: mod_base = OTHER; mod_base = m5c; note = sugar modification: 2'-O-methoxyethylribose
cttgtacttcatccc

SEQ ID NO: 593 - RNA, 15 nt, synthetic construct
  source 1..15: mol_type = other RNA; note = Antisense oligonucleotide
  modified_base 1: mod_base = OTHER; note = backbone modification: 5'-phosphorothioate; note = thymine; note = sugar modification: 2'-O-methoxyethylribose
  modified_base 2: mod_base = OTHER; mod_base = m5c; note = sugar modification: 2'-O-methoxyethylribose; note = backbone modification: 5'-phosphorothioate
  modified_base 3: mod_base = OTHER; note = sugar modification: 2'-O-methoxyethylribose; note = backbone modification: 5'-phosphorothioate; note = thymine
  modified_base 4: mod_base = OTHER; note = backbone modification: 5'-phosphorothioate; note = sugar modification: 2'-O-methoxyethylribose; note = thymine
  modified_base 5: mod_base = OTHER; note = sugar modification: 2'-O-methoxyethylribose; note = backbone modification: 5'-phosphorothioate
  modified_base 6: mod_base = OTHER; note = thymine; note = backbone modification: 5'-phosphorothioate; note = sugar modification: 2'-O-methoxyethylribose
  modified_base 7: mod_base = OTHER; note = sugar modification: 2'-O-methoxyethylribose; note = backbone modification: 5'-phosphorothioate
  modified_base 8: mod_base = m5c; mod_base = OTHER; note = backbone modification: 5'-phosphorothioate; note = sugar modification: 2'-O-methoxyethylribose
  modified_base 9: mod_base = OTHER; note = backbone modification: 5'-phosphorothioate; note = sugar modification: 2'-O-methoxyethylribose; note = thymine
  modified_base 10: mod_base = OTHER; note = thymine; note = backbone modification: 5'-phosphorothioate; note = sugar modification: 2'-O-methoxyethylribose
  modified_base 11: mod_base = m5c; mod_base = OTHER; note = sugar modification: 2'-O-methoxyethylribose; note = backbone modification: 5'-phosphorothioate
  modified_base 12: mod_base = OTHER; note = backbone modification: 5'-phosphorothioate; note = sugar modification: 2'-O-methoxyethylribose
  modified_base 13: mod_base = OTHER; note = sugar modification: 2'-O-methoxyethylribose; note = backbone modification: 5'-phosphorothioate; note = thymine
  modified_base 14: mod_base = OTHER; mod_base = m5c; note = sugar modification: 2'-O-methoxyethylribose; note = backbone modification: 5'-phosphorothioate
  modified_base 15: mod_base = OTHER; mod_base = m5c; note = sugar modification: 2'-O-methoxyethylribose
tcttgtacttcatcc

SEQ ID NO: 594 - RNA, 15 nt, synthetic construct
  source 1..15: mol_type = other RNA; note = Antisense oligonucleotide
  modified_base 1: mod_base = OTHER; note = backbone modification: 5'-phosphorothioate; note = sugar modification: 2'-O-methoxyethylribose; note = thymine
  modified_base 2: mod_base = OTHER; note = backbone modification: 5'-phosphorothioate; note = thymine; note = sugar modification: 2'-O-methoxyethylribose
  modified_base 3: mod_base = OTHER; mod_base = m5c; note = backbone modification: 5'-phosphorothioate; note = sugar modification: 2'-O-methoxyethylribose
  modified_base 4: mod_base = OTHER; note = thymine; note = sugar modification: 2'-O-methoxyethylribose; note = backbone modification: 5'-phosphorothioate
  modified_base 5: mod_base = OTHER; note = thymine; note = backbone modification: 5'-phosphorothioate; note = sugar modification: 2'-O-methoxyethylribose
  modified_base 6: mod_base = OTHER; note = backbone modification: 5'-phosphorothioate; note = sugar modification: 2'-O-methoxyethylribose
  modified_base 7: mod_base = OTHER; note = sugar modification: 2'-O-methoxyethylribose; note = backbone modification: 5'-phosphorothioate; note = thymine
  modified_base 8: mod_base = OTHER; note = backbone modification: 5'-phosphorothioate; note = sugar modification: 2'-O-methoxyethylribose
  modified_base 9: mod_base = OTHER; mod_base = m5c; note = backbone modification: 5'-phosphorothioate; note = sugar modification: 2'-O-methoxyethylribose
  modified_base 10: mod_base = OTHER; note = thymine; note = backbone modification: 5'-phosphorothioate; note = sugar modification: 2'-O-methoxyethylribose
  modified_base 11: mod_base = OTHER; note = sugar modification: 2'-O-methoxyethylribose; note = backbone modification: 5'-phosphorothioate; note = thymine
  modified_base 12: mod_base = OTHER; mod_base = m5c; note = sugar modification: 2'-O-methoxyethylribose; note = backbone modification: 5'-phosphorothioate
  modified_base 13: mod_base = OTHER; note = sugar modification: 2'-O-methoxyethylribose; note = backbone modification: 5'-phosphorothioate
  modified_base 14: mod_base = OTHER; note = backbone modification: 5'-phosphorothioate; note = sugar modification: 2'-O-methoxyethylribose; note = thymine
  modified_base 15: mod_base = m5c; mod_base = OTHER; note = sugar modification: 2'-O-methoxyethylribose
ttcttgtacttcatc

SEQ ID NO: 595 - RNA, 15 nt, synthetic construct
  source 1..15: mol_type = other RNA; note = Antisense oligonucleotide
  modified_base 1: mod_base = OTHER; note = sugar modification: 2'-O-methoxyethylribose; note = backbone modification: 5'-phosphorothioate
  modified_base 2: mod_base = OTHER; note = backbone modification: 5'-phosphorothioate; note = sugar modification: 2'-O-methoxyethylribose; note = thymine
  modified_base 3: mod_base = OTHER; note = thymine; note = backbone modification: 5'-phosphorothioate; note = sugar modification: 2'-O-methoxyethylribose
  modified_base 4: mod_base = OTHER; mod_base = m5c; note = sugar modification: 2'-O-methoxyethylribose; note = backbone modification: 5'-phosphorothioate
  modified_base 5: mod_base = OTHER; note = sugar modification: 2'-O-methoxyethylribose; note = thymine; note = backbone modification: 5'-phosphorothioate
  modified_base 6: mod_base = OTHER; note = thymine; note = sugar modification: 2'-O-methoxyethylribose; note = backbone modification: 5'-phosphorothioate
  modified_base 7: mod_base = OTHER; note = backbone modification: 5'-phosphorothioate; note = sugar modification: 2'-O-methoxyethylribose
  modified_base 8: mod_base = OTHER; note = thymine; note = sugar modification: 2'-O-methoxyethylribose; note = backbone modification: 5'-phosphorothioate
  modified_base 9: mod_base = OTHER; note = backbone modification: 5'-phosphorothioate; note = sugar modification: 2'-O-methoxyethylribose
  modified_base 10: mod_base = m5c; mod_base = OTHER; note = backbone modification: 5'-phosphorothioate; note = sugar modification: 2'-O-methoxyethylribose
  modified_base 11: mod_base = OTHER; note = sugar modification: 2'-O-methoxyethylribose; note = thymine; note = backbone modification: 5'-phosphorothioate
  modified_base 12: mod_base = OTHER; note = sugar modification: 2'-O-methoxyethylribose; note = backbone modification: 5'-phosphorothioate; note = thymine
  modified_base 13: mod_base = OTHER; mod_base = m5c; note = backbone modification: 5'-phosphorothioate; note = sugar modification: 2'-O-methoxyethylribose
  modified_base 14: mod_base = OTHER; note = sugar modification: 2'-O-methoxyethylribose; note = backbone modification: 5'-phosphorothioate
  modified_base 15: mod_base = OTHER; note = sugar modification: 2'-O-methoxyethylribose; note = thymine
gttcttgtacttcat

SEQ ID NO: 596 - RNA, 15 nt, synthetic construct
  source 1..15: mol_type = other RNA; note = Antisense oligonucleotide
  modified_base 1: mod_base = OTHER; note = backbone modification: 5'-phosphorothioate; note = thymine; note = sugar modification: 2'-O-methoxyethylribose
  modified_base 2: mod_base = OTHER; note = backbone modification: 5'-phosphorothioate; note = sugar modification: 2'-O-methoxyethylribose
  modified_base 3: mod_base = OTHER; note = backbone modification: 5'-phosphorothioate; note = thymine; note = sugar modification: 2'-O-methoxyethylribose
  modified_base 4: mod_base = OTHER; note = thymine; note = backbone modification: 5'-phosphorothioate; note = sugar modification: 2'-O-methoxyethylribose
  modified_base 5: mod_base = OTHER; mod_base = m5c; note = backbone modification: 5'-phosphorothioate; note = sugar modification: 2'-O-methoxyethylribose
  modified_base 6: mod_base = OTHER; note = sugar modification: 2'-O-methoxyethylribose; note = thymine; note = backbone modification: 5'-phosphorothioate
  modified_base 7: mod_base = OTHER; note = backbone modification: 5'-phosphorothioate; note = sugar modification: 2'-O-methoxyethylribose; note = thymine
  modified_base 8: mod_base = OTHER; note = backbone modification: 5'-phosphorothioate; note = sugar modification: 2'-O-methoxyethylribose
  modified_base 9: mod_base = OTHER; note = thymine; note = backbone modification: 5'-phosphorothioate; note = sugar modification: 2'-O-methoxyethylribose
  modified_base 10: mod_base = OTHER; note = backbone modification: 5'-phosphorothioate; note = sugar modification: 2'-O-methoxyethylribose
  modified_base 11: mod_base = m5c; mod_base = OTHER; note = sugar modification: 2'-O-methoxyethylribose; note = backbone modification: 5'-phosphorothioate
  modified_base 12: mod_base = OTHER; note = backbone modification: 5'-phosphorothioate; note = thymine; note = sugar modification: 2'-O-methoxyethylribose
  modified_base 13: mod_base = OTHER; note = backbone modification: 5'-phosphorothioate; note = thymine; note = sugar modification: 2'-O-methoxyethylribose
  modified_base 14: mod_base = OTHER; mod_base = m5c; note = backbone modification: 5'-phosphorothioate; note = sugar modification: 2'-O-methoxyethylribose
  modified_base 15: mod_base = OTHER; note = sugar modification: 2'-O-methoxyethylribose
tgttcttgtacttca

SEQ ID NO: 597 - RNA, 15 nt, synthetic construct
  source 1..15: mol_type = other RNA; note = Antisense oligonucleotide
  modified_base 1: mod_base = OTHER; note = backbone modification: 5'-phosphorothioate; note = sugar modification: 2'-O-methoxyethylribose
  modified_base 2: mod_base = OTHER; note = backbone modification: 5'-phosphorothioate; note = sugar modification: 2'-O-methoxyethylribose; note = thymine
  modified_base 3: mod_base = OTHER; note = backbone modification: 5'-phosphorothioate; note = sugar modification: 2'-O-methoxyethylribose
  modified_base 4: mod_base = OTHER; note = backbone modification: 5'-phosphorothioate; note = sugar modification: 2'-O-methoxyethylribose; note = thymine
  modified_base 5: mod_base = OTHER; note = thymine; note = sugar modification: 2'-O-methoxyethylribose; note = backbone modification: 5'-phosphorothioate
  modified_base 6: mod_base = OTHER; mod_base = m5c; note = sugar modification: 2'-O-methoxyethylribose; note = backbone modification: 5'-phosphorothioate
  modified_base 7: mod_base = OTHER; note = sugar modification: 2'-O-methoxyethylribose; note = backbone modification: 5'-phosphorothioate; note = thymine
  modified_base 8: mod_base = OTHER; note = thymine; note = sugar modification: 2'-O-methoxyethylribose; note = backbone modification: 5'-phosphorothioate
  modified_base 9: mod_base = OTHER; note = backbone modification: 5'-phosphorothioate; note = sugar modification: 2'-O-methoxyethylribose
  modified_base 10: mod_base = OTHER; note = backbone modification: 5'-phosphorothioate; note = thymine; note = sugar modification: 2'-O-methoxyethylribose
  modified_base 11: mod_base = OTHER; note = backbone modification: 5'-phosphorothioate; note = sugar modification: 2'-O-methoxyethylribose
  modified_base 12: mod_base = OTHER; mod_base = m5c; note = backbone modification: 5'-phosphorothioate; note = sugar modification: 2'-O-methoxyethylribose
  modified_base 13: mod_base = OTHER; note = backbone modification: 5'-phosphorothioate; note = thymine; note = sugar modification: 2'-O-methoxyethylribose
  modified_base 14: mod_base = OTHER; note = thymine; note = backbone modification: 5'-phosphorothioate; note = sugar modification: 2'-O-methoxyethylribose
  modified_base 15: mod_base = OTHER; mod_base = m5c; note = sugar modification: 2'-O-methoxyethylribose
gtgttcttgtacttc

SEQ ID NO: 598 - RNA, 15 nt, synthetic construct
  source 1..15: mol_type = other RNA; note = Antisense oligonucleotide
  modified_base 1: mod_base = OTHER; note = backbone modification: 5'-phosphorothioate; note = sugar modification: 2'-O-methoxyethylribose
  modified_base 2: mod_base = OTHER; note = sugar modification: 2'-O-methoxyethylribose; note = backbone modification: 5'-phosphorothioate
  modified_base 3: mod_base = OTHER; note = backbone modification: 5'-phosphorothioate; note = thymine; note = sugar modification: 2'-O-methoxyethylribose
  modified_base 4: mod_base = OTHER; note = sugar modification: 2'-O-methoxyethylribose; note = backbone modification: 5'-phosphorothioate
  modified_base 5: mod_base = OTHER; note = sugar modification: 2'-O-methoxyethylribose; note = backbone modification: 5'-phosphorothioate; note = thymine
  modified_base 6: mod_base = OTHER; note = backbone modification: 5'-phosphorothioate; note = thymine; note = sugar modification: 2'-O-methoxyethylribose
  modified_base 7: mod_base = OTHER; mod_base = m5c; note = sugar modification: 2'-O-methoxyethylribose; note = backbone modification: 5'-phosphorothioate
  modified_base 8: mod_base = OTHER; note = sugar modification: 2'-O-methoxyethylribose; note = backbone modification: 5'-phosphorothioate; note = thymine
  modified_base 9: mod_base = OTHER; note = thymine; note = sugar modification: 2'-O-methoxyethylribose; note = backbone modification: 5'-phosphorothioate
  modified_base 10: mod_base = OTHER; note = sugar modification: 2'-O-methoxyethylribose; note = backbone modification: 5'-phosphorothioate
  modified_base 11: mod_base = OTHER; note = sugar modification: 2'-O-methoxyethylribose; note = thymine; note = backbone modification: 5'-phosphorothioate
  modified_base 12: mod_base = OTHER; note = sugar modification: 2'-O-methoxyethylribose; note = backbone modification: 5'-phosphorothioate
  modified_base 13: mod_base = OTHER; mod_base = m5c; note = sugar modification: 2'-O-methoxyethylribose; note = backbone modification: 5'-phosphorothioate
  modified_base 14: mod_base = OTHER; note = sugar modification: 2'-O-methoxyethylribose; note = thymine; note = backbone modification: 5'-phosphorothioate
  modified_base 15: mod_base = OTHER; note = sugar modification: 2'-O-methoxyethylribose; note = thymine
ggtgttcttgtactt

SEQ ID NO: 599 - RNA, 15 nt, synthetic construct
  source 1..15: mol_type = other RNA; note = Antisense oligonucleotide
  modified_base 1: mod_base = OTHER; note = backbone modification: 5'-phosphorothioate; note = sugar modification: 2'-O-methoxyethylribose
  modified_base 2: mod_base = OTHER; note = backbone modification: 5'-phosphorothioate; note = sugar modification: 2'-O-methoxyethylribose
  modified_base 3: mod_base = OTHER; note = backbone modification: 5'-phosphorothioate; note = sugar modification: 2'-O-methoxyethylribose
  modified_base 4: mod_base = OTHER; note = thymine; note = backbone modification: 5'-phosphorothioate; note = sugar modification: 2'-O-methoxyethylribose
  modified_base 5: mod_base = OTHER; note = sugar modification: 2'-O-methoxyethylribose; note = backbone modification: 5'-phosphorothioate
  modified_base 6: mod_base = OTHER; note = sugar modification: 2'-O-methoxyethylribose; note = thymine; note = backbone modification: 5'-phosphorothioate
  modified_base 7: mod_base = OTHER; note = thymine; note = sugar modification: 2'-O-methoxyethylribose; note = backbone modification: 5'-phosphorothioate
  modified_base 8: mod_base = m5c; mod_base = OTHER; note = backbone modification: 5'-phosphorothioate; note = sugar modification: 2'-O-methoxyethylribose
  modified_base 9: mod_base = OTHER; note = sugar modification: 2'-O-methoxyethylribose; note = thymine; note = backbone modification: 5'-phosphorothioate
  modified_base 10: mod_base = OTHER; note = backbone modification: 5'-phosphorothioate; note = thymine; note = sugar modification: 2'-O-methoxyethylribose
  modified_base 11: mod_base = OTHER; note = sugar modification: 2'-O-methoxyethylribose; note = backbone modification: 5'-phosphorothioate
  modified_base 12: mod_base = OTHER; note = backbone modification: 5'-phosphorothioate; note = sugar modification: 2'-O-methoxyethylribose; note = thymine
  modified_base 13: mod_base = OTHER; note = sugar modification: 2'-O-methoxyethylribose; note = backbone modification: 5'-phosphorothioate
  modified_base 14: mod_base = m5c; mod_base = OTHER; note = sugar modification: 2'-O-methoxyethylribose; note = backbone modification: 5'-phosphorothioate
  modified_base 15: mod_base = OTHER; note = thymine; note = sugar modification: 2'-O-methoxyethylribose
aggtgttcttgtact

SEQ ID NO: 600 - RNA, 15 nt, synthetic construct
  source 1..15: mol_type = other RNA; note = Antisense oligonucleotide
  modified_base 1: mod_base = OTHER; note = backbone modification: 5'-phosphorothioate; note = sugar modification: 2'-O-methoxyethylribose
  modified_base 2: mod_base = OTHER; note = backbone modification: 5'-phosphorothioate; note = sugar modification: 2'-O-methoxyethylribose
  modified_base 3: mod_base = OTHER; note = sugar modification: 2'-O-methoxyethylribose; note = backbone modification: 5'-phosphorothioate
  modified_base 4: mod_base = OTHER; note = backbone modification: 5'-phosphorothioate; note = sugar modification: 2'-O-methoxyethylribose
  modified_base 5: mod_base = OTHER; note = backbone modification: 5'-phosphorothioate; note = sugar modification: 2'-O-methoxyethylribose; note = thymine
  modified_base 6: mod_base = OTHER; note = sugar modification: 2'-O-methoxyethylribose; note = backbone modification: 5'-phosphorothioate
  modified_base 7: mod_base = OTHER; note = sugar modification: 2'-O-methoxyethylribose; note = backbone modification: 5'-phosphorothioate; note = thymine
  modified_base 8: mod_base = OTHER; note = sugar modification: 2'-O-methoxyethylribose; note = thymine; note = backbone modification: 5'-phosphorothioate
  modified_base 9: mod_base = m5c; mod_base = OTHER; note = backbone modification: 5'-phosphorothioate; note = sugar modification: 2'-O-methoxyethylribose
  modified_base 10: mod_base = OTHER; note = thymine; note = sugar modification: 2'-O-methoxyethylribose; note = backbone modification: 5'-phosphorothioate
  modified_base 11: mod_base = OTHER; note = backbone modification: 5'-phosphorothioate; note = sugar modification: 2'-O-methoxyethylribose; note = thymine
  modified_base 12: mod_base = OTHER; note = sugar modification: 2'-O-methoxyethylribose; note = backbone modification: 5'-phosphorothioate
  modified_base 13: mod_base = OTHER; note = backbone modification: 5'-phosphorothioate; note = thymine; note = sugar modification: 2'-O-methoxyethylribose
  modified_base 14: mod_base = OTHER; note = backbone modification: 5'-phosphorothioate; note = sugar modification: 2'-O-methoxyethylribose
  modified_base 15: mod_base = m5c; mod_base = OTHER; note = sugar modification: 2'-O-methoxyethylribose
aaggtgttcttgtac

SEQ ID NO: 601 - RNA, 15 nt, synthetic construct
  source 1..15: mol_type = other RNA; note = Antisense oligonucleotide
  modified_base 1: mod_base = OTHER; note = thymine; note = backbone modification: 5'-phosphorothioate; note = sugar modification: lna
  modified_base 2: mod_base = OTHER; note = sugar modification: lna; note = backbone modification: 5'-phosphorothioate; note = thymine
  modified_base 3: mod_base = OTHER; note = sugar modification: lna; note = backbone modification: 5'-phosphorothioate
  modified_base 4: mod_base = OTHER; note = sugar modification: 2'-O-methoxyethylribose; note = backbone modification: 5'-phosphorothioate; note = thymine
  modified_base 5: mod_base = OTHER; note = sugar modification: 2'-O-methoxyethylribose; note = backbone modification: 5'-phosphorothioate
  modified_base 6: mod_base = m5c; mod_base = OTHER; note = backbone modification: 5'-phosphorothioate; note = sugar modification: 2'-O-methoxyethylribose
  modified_base 7: mod_base = OTHER; note = thymine; note = backbone modification: 5'-phosphorothioate; note = sugar modification: 2'-O-methoxyethylribose
  modified_base 8: mod_base = OTHER; note = thymine; note = backbone modification: 5'-phosphorothioate; note = sugar modification: 2'-O-methoxyethylribose
  modified_base 9: mod_base = OTHER; mod_base = m5c; note = backbone modification: 5'-phosphorothioate; note = sugar modification: 2'-O-methoxyethylribose
  modified_base 10: mod_base = OTHER; note = backbone modification: 5'-phosphorothioate; note = sugar modification: 2'-O-methoxyethylribose
  modified_base 11: mod_base = OTHER; note = backbone modification: 5'-phosphorothioate; note = sugar modification: 2'-O-methoxyethylribose; note = thymine
  modified_base 12: mod_base = OTHER; mod_base = m5c; note = sugar modification: 2'-O-methoxyethylribose; note = backbone modification: 5'-phosphorothioate
  modified_base 13: mod_base = m5c; mod_base = OTHER; note = backbone modification: 5'-phosphorothioate; note = sugar modification: lna
  modified_base 14: mod_base = OTHER; mod_base = m5c; note = sugar modification: lna; note = backbone modification: 5'-phosphorothioate
  modified_base 15: mod_base = OTHER; note = sugar modification: lna
ttgtacttcatccca

SEQ ID NO: 602 - RNA, 15 nt, synthetic construct
  source 1..15: mol_type = other RNA; note = Antisense oligonucleotide
  modified_base 1: mod_base = m5c; mod_base = OTHER; note = backbone modification: 5'-phosphorothioate; note = sugar modification: lna
  modified_base 2: mod_base = OTHER; note = sugar modification: lna; note = thymine; note = backbone modification: 5'-phosphorothioate
  modified_base 3: mod_base = OTHER; note = backbone modification: 5'-phosphorothioate; note = sugar modification: lna; note = thymine
  modified_base 4: mod_base = OTHER; note = backbone modification: 5'-phosphorothioate; note = sugar modification: 2'-O-methoxyethylribose
  modified_base 5: mod_base = OTHER; note = thymine; note = sugar modification: 2'-O-methoxyethylribose; note = backbone modification: 5'-phosphorothioate
  modified_base 6: mod_base = OTHER; note = backbone modification: 5'-phosphorothioate; note = sugar modification: 2'-O-methoxyethylribose
  modified_base 7: mod_base = OTHER; mod_base = m5c; note = backbone modification: 5'-phosphorothioate; note = sugar modification: 2'-O-methoxyethylribose
  modified_base 8: mod_base = OTHER; note = backbone modification: 5'-phosphorothioate; note = thymine; note = sugar modification: 2'-O-methoxyethylribose
  modified_base 9: mod_base = OTHER; note = backbone modification: 5'-phosphorothioate; note = thymine; note = sugar modification: 2'-O-methoxyethylribose
  modified_base 10: mod_base = OTHER; mod_base = m5c; note = backbone modification: 5'-phosphorothioate; note = sugar modification: 2'-O-methoxyethylribose
  modified_base 11: mod_base = OTHER; note = backbone modification: 5'-phosphorothioate; note = sugar modification: 2'-O-methoxyethylribose
  modified_base 12: mod_base = OTHER; note = sugar modification: 2'-O-methoxyethylribose; note = thymine; note = backbone modification: 5'-phosphorothioate
  modified_base 13: mod_base = m5c; mod_base = OTHER; note = sugar modification: lna; note = backbone modification: 5'-phosphorothioate
  modified_base 14: mod_base = m5c; mod_base = OTHER; note = backbone modification: 5'-phosphorothioate; note = sugar modification: lna
  modified_base 15: mod_base = OTHER; mod_base = m5c; note = sugar modification: lna
cttgtacttcatccc

SEQ ID NO: 603 - RNA, 15 nt, synthetic construct
  source 1..15: mol_type = other RNA; note = Antisense oligonucleotide
  modified_base 1: mod_base = OTHER; note = backbone modification: 5'-phosphorothioate; note = thymine; note = sugar modification: lna
  modified_base 2: mod_base = OTHER; mod_base = m5c; note = backbone modification: 5'-phosphorothioate; note = sugar modification: lna
  modified_base 3: mod_base = OTHER; note = sugar modification: lna; note = backbone modification: 5'-phosphorothioate; note = thymine
  modified_base 4: mod_base = OTHER; note = backbone modification: 5'-phosphorothioate; note = thymine; note = sugar modification: 2'-O-methoxyethylribose
  modified_base 5: mod_base = OTHER; note = sugar modification: 2'-O-methoxyethylribose; note = backbone modification: 5'-phosphorothioate
  modified_base 6: mod_base = OTHER; note = thymine; note = backbone modification: 5'-phosphorothioate; note = sugar modification: 2'-O-methoxyethylribose
  modified_base 7: mod_base = OTHER; note = backbone modification: 5'-phosphorothioate; note = sugar modification: 2'-O-methoxyethylribose
  modified_base 8: mod_base = OTHER; mod_base = m5c; note = sugar modification: 2'-O-methoxyethylribose; note = backbone modification: 5'-phosphorothioate
  modified_base 9: mod_base = OTHER; note = backbone modification: 5'-phosphorothioate; note = sugar modification: 2'-O-methoxyethylribose; note = thymine
  modified_base 10: mod_base = OTHER; note = thymine; note = backbone modification: 5'-phosphorothioate; note = sugar modification: 2'-O-methoxyethylribose
  modified_base 11: mod_base = OTHER; mod_base = m5c; note = backbone modification: 5'-phosphorothioate; note = sugar modification: 2'-O-methoxyethylribose
  modified_base 12: mod_base = OTHER; note = sugar modification: 2'-O-methoxyethylribose; note = backbone modification: 5'-phosphorothioate
  modified_base 13: mod_base = OTHER; note = backbone modification: 5'-phosphorothioate; note = sugar modification: lna; note = thymine
  modified_base 14: mod_base = OTHER; mod_base = m5c; note = sugar modification: lna; note = backbone modification: 5'-phosphorothioate
  modified_base 15: mod_base = OTHER; mod_base = m5c; note = sugar modification: lna
tcttgtacttcatcc

SEQ ID NO: 604 - RNA, 15 nt, synthetic construct
  source 1..15: mol_type = other RNA; note = Antisense oligonucleotide
  modified_base 1: mod_base = OTHER; note = backbone modification: 5'-phosphorothioate; note = thymine; note = sugar modification: lna
  modified_base 2: mod_base = OTHER; note = backbone modification: 5'-phosphorothioate; note = thymine; note = sugar modification: lna
  modified_base 3: mod_base = m5c; mod_base = OTHER; note = sugar modification: lna; note = backbone modification: 5'-phosphorothioate
  modified_base 4: mod_base = OTHER; note = thymine; note = backbone modification: 5'-phosphorothioate; note = sugar modification: 2'-O-methoxyethylribose
  modified_base 5: mod_base = OTHER; note = sugar modification: 2'-O-methoxyethylribose; note = backbone modification: 5'-phosphorothioate; note = thymine
  modified_base 6: mod_base = OTHER; note = backbone modification: 5'-phosphorothioate; note = sugar modification: 2'-O-methoxyethylribose
  modified_base 7: mod_base = OTHER; note = backbone modification: 5'-phosphorothioate; note = thymine; note = sugar modification: 2'-O-methoxyethylribose
  modified_base 8: mod_base = OTHER; note = sugar modification: 2'-O-methoxyethylribose; note = backbone modification: 5'-phosphorothioate
  modified_base 9: mod_base = OTHER; mod_base = m5c; note = backbone modification: 5'-phosphorothioate; note = sugar modification: 2'-O-methoxyethylribose
  modified_base 10: mod_base = OTHER; note = backbone modification: 5'-phosphorothioate; note = thymine; note = sugar modification: 2'-O-methoxyethylribose
  modified_base 11: mod_base = OTHER; note = backbone modification: 5'-phosphorothioate; note = thymine; note = sugar modification: 2'-O-methoxyethylribose
  modified_base 12: mod_base = OTHER; mod_base = m5c; note = sugar modification: 2'-O-methoxyethylribose; note = backbone modification: 5'-phosphorothioate
  modified_base 13: mod_base = OTHER; note = backbone modification: 5'-phosphorothioate; note = sugar modification: lna
  modified_base 14: mod_base = OTHER; note = sugar modification: lna; note = backbone modification: 5'-phosphorothioate; note = thymine
  modified_base 15: mod_base = m5c; mod_base = OTHER; note = sugar modification: lna
ttcttgtacttcatc

SEQ ID NO: 605 - RNA, 15 nt, synthetic construct
  source 1..15: mol_type = other RNA; note = Antisense oligonucleotide
  modified_base 1: mod_base = OTHER; note = backbone modification: 5'-phosphorothioate; note = sugar modification: lna
  modified_base 2: mod_base = OTHER; note = backbone modification: 5'-phosphorothioate; note = sugar modification: lna; note = thymine
  modified_base 3: mod_base = OTHER; note = thymine; note = sugar modification: lna; note = backbone modification: 5'-phosphorothioate
  modified_base 4: mod_base = OTHER; mod_base = m5c; note = sugar modification: 2'-O-methoxyethylribose; note = backbone modification: 5'-phosphorothioate
  modified_base 5: mod_base = OTHER; note = thymine; note = backbone modification: 5'-phosphorothioate; note = sugar modification: 2'-O-methoxyethylribose
  modified_base 6: mod_base = OTHER; note = backbone modification: 5'-phosphorothioate; note = sugar modification: 2'-O-methoxyethylribose; note = thymine
  modified_base 7: mod_base = OTHER; note = backbone modification: 5'-phosphorothioate; note = sugar modification: 2'-O-methoxyethylribose
  modified_base 8: mod_base = OTHER; note = thymine; note = sugar modification: 2'-O-methoxyethylribose; note = backbone modification: 5'-phosphorothioate
  modified_base 9: mod_base = OTHER; note = backbone modification: 5'-phosphorothioate; note = sugar modification: 2'-O-methoxyethylribose
  modified_base 10: mod_base = m5c; mod_base = OTHER; note = backbone modification: 5'-phosphorothioate; note = sugar modification: 2'-O-methoxyethylribose
  modified_base 11: mod_base = OTHER; note = thymine; note = backbone modification: 5'-phosphorothioate; note = sugar modification: 2'-O-methoxyethylribose
  modified_base 12: mod_base = OTHER; note = thymine; note = backbone modification: 5'-phosphorothioate; note = sugar modification: 2'-O-methoxyethylribose
  modified_base 13: mod_base = OTHER; mod_base = m5c; note = backbone modification: 5'-phosphorothioate; note = sugar modification: lna
  modified_base 14: mod_base = OTHER; note = sugar modification: lna; note = backbone modification: 5'-phosphorothioate
  modified_base 15: mod_base = OTHER; note = thymine; note = sugar modification: lna
gttcttgtacttcat

SEQ ID NO: 606 - RNA, 15 nt, synthetic construct
  source 1..15: mol_type = other RNA; note = Antisense oligonucleotide
  modified_base 1: mod_base = OTHER; note = thymine; note = sugar modification: lna; note = backbone modification: 5'-phosphorothioate
  modified_base 2: mod_base = OTHER; note = backbone modification: 5'-phosphorothioate; note = sugar modification: lna
  modified_base 3: mod_base = OTHER; note = backbone modification: 5'-phosphorothioate; note = thymine; note = sugar modification: lna
  modified_base 4: mod_base = OTHER; note = thymine; note = sugar modification: 2'-O-methoxyethylribose; note = backbone modification: 5'-phosphorothioate
  modified_base 5: mod_base = m5c; mod_base = OTHER; note = backbone modification: 5'-phosphorothioate; note = sugar modification: 2'-O-methoxyethylribose
  modified_base 6: mod_base = OTHER; note = sugar modification: 2'-O-methoxyethylribose; note = backbone modification: 5'-phosphorothioate; note = thymine
  modified_base 7: mod_base = OTHER; note = sugar modification: 2'-O-methoxyethylribose; note = thymine; note = backbone modification: 5'-phosphorothioate
  modified_base 8: mod_base = OTHER; note = backbone modification: 5'-phosphorothioate; note = sugar modification: 2'-O-methoxyethylribose
  modified_base 9: mod_base = OTHER; note = thymine; note = backbone modification: 5'-phosphorothioate; note = sugar modification: 2'-O-methoxyethylribose
  modified_base 10: mod_base = OTHER; note = backbone modification: 5'-phosphorothioate; note = sugar modification: 2'-O-methoxyethylribose
  modified_base 11: mod_base = m5c; mod_base = OTHER; note = sugar modification: 2'-O-methoxyethylribose; note = backbone modification: 5'-phosphorothioate
  modified_base 12: mod_base = OTHER; note = thymine; note = backbone modification: 5'-phosphorothioate; note = sugar modification: 2'-O-methoxyethylribose
  modified_base 13: mod_base = OTHER; note = backbone modification: 5'-phosphorothioate; note = thymine; note = sugar modification: lna
  modified_base 14: mod_base = m5c; mod_base = OTHER; note = sugar modification: lna; note = backbone modification: 5'-phosphorothioate
  modified_base 15: mod_base = OTHER; note = sugar modification: lna
tgttcttgtacttca

SEQ ID NO: 607 - RNA, 15 nt, synthetic construct
  source 1..15: mol_type = other RNA; note = Antisense oligonucleotide
  modified_base 1: mod_base = OTHER; note = sugar modification: lna; note = backbone modification: 5'-phosphorothioate
  modified_base 2: mod_base = OTHER; note = thymine; note = sugar modification: lna; note = backbone modification: 5'-phosphorothioate
  modified_base 3: mod_base = OTHER; note = sugar modification: lna; note = backbone modification: 5'-phosphorothioate
  modified_base 4: mod_base = OTHER; note = thymine; note = sugar modification: 2'-O-methoxyethylribose; note = backbone modification: 5'-phosphorothioate
  modified_base 5: mod_base = OTHER; note = thymine; note = backbone modification: 5'-phosphorothioate; note = sugar modification: 2'-O-methoxyethylribose
  modified_base 6: mod_base = m5c; mod_base = OTHER; note = backbone modification: 5'-phosphorothioate; note = sugar modification: 2'-O-methoxyethylribose
  modified_base 7: mod_base = OTHER; note = thymine; note = backbone modification: 5'-phosphorothioate; note = sugar modification: 2'-O-methoxyethylribose
  modified_base 8: mod_base = OTHER; note = thymine; note = sugar modification: 2'-O-methoxyethylribose; note = backbone modification: 5'-phosphorothioate
  modified_base 9: mod_base = OTHER; note = sugar modification: 2'-O-methoxyethylribose; note = backbone modification: 5'-phosphorothioate
  modified_base 10: mod_base = OTHER; note = thymine; note = backbone modification: 5'-phosphorothioate; note = sugar modification: 2'-O-methoxyethylribose
  modified_base 11: mod_base = OTHER; note = backbone modification: 5'-phosphorothioate; note = sugar modification: 2'-O-methoxyethylribose
  modified_base 12: mod_base = OTHER; mod_base = m5c; note = sugar modification: 2'-O-methoxyethylribose; note = backbone modification: 5'-phosphorothioate
  modified_base 13: mod_base = OTHER; note = thymine; note = backbone modification: 5'-phosphorothioate; note = sugar modification: lna
  modified_base 14: mod_base = OTHER; note = sugar modification: lna; note = backbone modification: 5'-phosphorothioate; note = thymine
  modified_base 15: mod_base = OTHER; mod_base = m5c; note = sugar modification: lna
gtgttcttgtacttc

SEQ ID NO: 608 - RNA, 15 nt, synthetic construct
  source 1..15: mol_type = other RNA; note = Antisense oligonucleotide
  modified_base 1: mod_base = OTHER; note = backbone modification: 5'-phosphorothioate; note = sugar modification: lna
  modified_base 2: mod_base = OTHER; note = sugar modification: lna; note = backbone modification: 5'-phosphorothioate
  modified_base 3: mod_base = OTHER; note = thymine; note = backbone modification: 5'-phosphorothioate; note = sugar modification: lna
  modified_base 4: mod_base = OTHER; note = sugar modification: 2'-O-methoxyethylribose; note = backbone modification: 5'-phosphorothioate
  modified_base 5: mod_base = OTHER; note = backbone modification: 5'-phosphorothioate; note = sugar modification: 2'-O-methoxyethylribose; note = thymine
  modified_base 6: mod_base = OTHER; note = thymine; note = backbone modification: 5'-phosphorothioate; note = sugar modification: 2'-O-methoxyethylribose
  modified_base 7: mod_base = OTHER; mod_base = m5c; note = backbone modification: 5'-phosphorothioate; note = sugar modification: 2'-O-methoxyethylribose
  modified_base 8: mod_base = OTHER; note = thymine; note = backbone modification: 5'-phosphorothioate; note = sugar modification: 2'-O-methoxyethylribose
  modified_base 9: mod_base = OTHER; note = sugar modification: 2'-O-methoxyethylribose; note = backbone modification: 5'-phosphorothioate; note = thymine
  modified_base 10: mod_base = OTHER; note = sugar modification: 2'-O-methoxyethylribose; note = backbone modification: 5'-phosphorothioate
  modified_base 11: mod_base = OTHER; note = sugar modification: 2'-O-methoxyethylribose; note = thymine; note = backbone modification: 5'-phosphorothioate
  modified_base 12: mod_base = OTHER; note = sugar modification: 2'-O-methoxyethylribose; note = backbone modification: 5'-phosphorothioate
  modified_base 13: mod_base = OTHER; mod_base = m5c; note = backbone modification: 5'-phosphorothioate; note = sugar modification: lna
  modified_base 14: mod_base = OTHER; note = sugar modification: lna; note = thymine; note = backbone modification: 5'-phosphorothioate
  modified_base 15: mod_base = OTHER; note = thymine; note = sugar modification: lna
ggtgttcttgtactt

SEQ ID NO: 609 - RNA, 15 nt, synthetic construct
  source 1..15: mol_type = other RNA; note = Antisense oligonucleotide
  modified_base 1: mod_base = OTHER; note = sugar modification: lna; note = backbone modification: 5'-phosphorothioate
  modified_base 2: mod_base = OTHER; note = sugar modification: lna; note = backbone modification: 5'-phosphorothioate
  modified_base 3: mod_base = OTHER; note = sugar modification: lna; note = backbone modification: 5'-phosphorothioate
  modified_base 4: mod_base = OTHER; note = thymine; note = backbone modification: 5'-phosphorothioate; note = sugar modification: 2'-O-methoxyethylribose
  modified_base 5: mod_base = OTHER; note = backbone modification: 5'-phosphorothioate; note = sugar modification: 2'-O-methoxyethylribose
  modified_base 6: mod_base = OTHER; note = thymine; note = backbone modification: 5'-phosphorothioate; note = sugar modification: 2'-O-methoxyethylribose
  modified_base 7: mod_base = OTHER; note = sugar modification: 2'-O-methoxyethylribose; note = thymine; note = backbone modification: 5'-phosphorothioate
  modified_base 8: mod_base = m5c; mod_base = OTHER; note = backbone modification: 5'-phosphorothioate; note = sugar modification: 2'-O-methoxyethylribose
  modified_base 9: mod_base = OTHER; note = thymine; note = backbone modification: 5'-phosphorothioate; note = sugar modification: 2'-O-methoxyethylribose
  modified_base 10: mod_base = OTHER; note = thymine; note = backbone modification: 5'-phosphorothioate; note = sugar modification: 2'-O-methoxyethylribose
  modified_base 11: mod_base = OTHER; note = backbone modification: 5'-phosphorothioate; note = sugar modification: 2'-O-methoxyethylribose
  modified_base 12: mod_base = OTHER; note = sugar modification: 2'-O-methoxyethylribose; note = backbone modification: 5'-phosphorothioate; note = thymine
  modified_base 13: mod_base = OTHER; note = sugar modification: lna; note = backbone modification: 5'-phosphorothioate
  modified_base 14: mod_base = OTHER; mod_base = m5c; note = backbone modification: 5'-phosphorothioate; note = sugar modification: lna
  modified_base 15: mod_base = OTHER; note = thymine; note = sugar modification: lna
aggtgttcttgtact

SEQ ID NO: 610 - RNA, 15 nt, synthetic construct
  source 1..15: mol_type = other RNA; note = Antisense oligonucleotide
  modified_base 1: mod_base = OTHER; note = backbone modification: 5'-phosphorothioate; note = sugar modification: lna
  modified_base 2: mod_base = OTHER; note = backbone modification: 5'-phosphorothioate; note = sugar modification: lna
  modified_base 3: mod_base = OTHER; note = sugar modification: lna; note = backbone modification: 5'-phosphorothioate
  modified_base 4: mod_base = OTHER; note = backbone modification: 5'-phosphorothioate; note = sugar modification: 2'-O-methoxyethylribose
  modified_base 5: mod_base = OTHER; note = sugar modification: 2'-O-methoxyethylribose; note = thymine; note = backbone modification: 5'-phosphorothioate
  modified_base 6: mod_base = OTHER; note = backbone modification: 5'-phosphorothioate; note = sugar modification: 2'-O-methoxyethylribose
  modified_base 7: mod_base = OTHER; note = thymine; note = backbone modification: 5'-phosphorothioate; note = sugar modification: 2'-O-methoxyethylribose
  modified_base 8: mod_base = OTHER; note = sugar modification: 2'-O-methoxyethylribose; note = backbone modification: 5'-phosphorothioate; note = thymine
  modified_base 9: mod_base = OTHER; mod_base = m5c; note = backbone modification: 5'-phosphorothioate; note = sugar modification: 2'-O-methoxyethylribose
  modified_base 10: mod_base = OTHER; note = sugar modification: 2'-O-methoxyethylribose; note = backbone modification: 5'-phosphorothioate; note = thymine
  modified_base 11: mod_base = OTHER; note = backbone modification: 5'-phosphorothioate; note = sugar modification: 2'-O-methoxyethylribose; note = thymine
  modified_base 12: mod_base = OTHER; note = sugar modification: 2'-O-methoxyethylribose; note = backbone modification: 5'-phosphorothioate
  modified_base 13: mod_base = OTHER; note = sugar modification: lna; note = backbone modification: 5'-phosphorothioate; note = thymine
  modified_base 14: mod_base = OTHER; note = sugar modification: lna; note = backbone modification: 5'-phosphorothioate
  modified_base 15: mod_base = m5c; mod_base = OTHER; note = sugar modification: lna
aaggtgttcttgtac

SEQ ID NO: 611 - RNA, 16 nt, synthetic construct
  source 1..16: mol_type = other RNA; note = Antisense oligonucleotide
  modified_base 1: mod_base = OTHER; mod_base = m5c; note = backbone modification: 5'-phosphorothioate; note = sugar modification: 2'-O-methoxyethylribose
  modified_base 2: mod_base = OTHER; note = thymine; note = sugar modification: 2'-O-methoxyethylribose; note = backbone modification: 5'-phosphorothioate
  modified_base 3: mod_base = OTHER; note = sugar modification: 2'-O-methoxyethylribose; note = backbone modification: 5'-phosphorothioate; note = thymine
  modified_base 4: mod_base = OTHER; note = backbone modification: 5'-phosphorothioate; note = sugar modification: 2'-O-methoxyethylribose
  modified_base 5: mod_base = OTHER; note = backbone modification: 5'-phosphorothioate; note = sugar modification: 2'-O-methoxyethylribose; note = thymine
  modified_base 6: mod_base = OTHER; note = sugar modification: 2'-O-methoxyethylribose; note = backbone modification: 5'-phosphorothioate
  modified_base 7: mod_base = m5c; mod_base = OTHER; note = backbone modification: 5'-phosphorothioate; note = sugar modification: 2'-O-methoxyethylribose
  modified_base 8: mod_base = OTHER; note = sugar modification: 2'-O-methoxyethylribose; note = backbone modification: 5'-phosphorothioate; note = thymine
  modified_base 9: mod_base = OTHER; note = backbone modification: 5'-phosphorothioate; note = sugar modification: 2'-O-methoxyethylribose; note = thymine
  modified_base 10: mod_base = OTHER; mod_base = m5c; note = sugar modification: 2'-O-methoxyethylribose; note = backbone modification: 5'-phosphorothioate
  modified_base 11: mod_base = OTHER; note = backbone modification: 5'-phosphorothioate; note = sugar modification: 2'-O-methoxyethylribose
  modified_base 12: mod_base = OTHER; note = sugar modification: 2'-O-methoxyethylribose; note = thymine; note = backbone modification: 5'-phosphorothioate
  modified_base 13: mod_base = OTHER; mod_base = m5c; note = backbone modification: 5'-phosphorothioate; note = sugar modification: 2'-O-methoxyethylribose
  modified_base 14: mod_base = m5c; mod_base = OTHER; note = sugar modification: 2'-O-methoxyethylribose; note = backbone modification: 5'-phosphorothioate
  modified_base 15: mod_base = m5c; mod_base = OTHER; note = sugar modification: 2'-O-methoxyethylribose; note = backbone modification: 5'-phosphorothioate
  modified_base 16: mod_base = OTHER; note = sugar modification: 2'-O-methoxyethylribose
cttgtacttcatccca

SEQ ID NO: 612 - RNA, 16 nt, synthetic construct
  source 1..16: mol_type = other RNA; note = Antisense oligonucleotide
  modified_base 1: mod_base = OTHER; note = thymine; note = backbone modification: 5'-phosphorothioate; note = sugar modification: 2'-O-methoxyethylribose
  modified_base 2: mod_base = m5c; mod_base = OTHER; note = sugar modification: 2'-O-methoxyethylribose; note = backbone modification: 5'-phosphorothioate
  modified_base 3: mod_base = OTHER; note = sugar modification: 2'-O-methoxyethylribose; note = backbone modification: 5'-phosphorothioate; note = thymine
  modified_base 4: mod_base = OTHER; note = sugar modification: 2'-O-methoxyethylribose; note = thymine; note = backbone modification: 5'-phosphorothioate
  modified_base 5: mod_base = OTHER; note = sugar modification: 2'-O-methoxyethylribose; note = backbone modification: 5'-phosphorothioate
  modified_base 6: mod_base = OTHER; note = sugar modification: 2'-O-methoxyethylribose; note = backbone modification: 5'-phosphorothioate; note = thymine
  modified_base 7: mod_base = OTHER; note = sugar modification: 2'-O-methoxyethylribose; note = backbone modification: 5'-phosphorothioate
  modified_base 8: mod_base = m5c; mod_base = OTHER; note = backbone modification: 5'-phosphorothioate; note = sugar modification: 2'-O-methoxyethylribose
  modified_base 9: mod_base = OTHER; note = sugar modification: 2'-O-methoxyethylribose; note = backbone modification: 5'-phosphorothioate; note = thymine
  modified_base 10: mod_base = OTHER; note = thymine; note = backbone modification: 5'-phosphorothioate; note = sugar modification: 2'-O-methoxyethylribose
  modified_base 11: mod_base = m5c; mod_base = OTHER; note = backbone modification: 5'-phosphorothioate; note = sugar modification: 2'-O-methoxyethylribose
  modified_base 12: mod_base = OTHER; note = backbone modification: 5'-phosphorothioate; note = sugar modification: 2'-O-methoxyethylribose
  modified_base 13: mod_base = OTHER; note = sugar modification: 2'-O-methoxyethylribose; note = thymine; note = backbone modification: 5'-phosphorothioate
  modified_base 14: mod_base = m5c; mod_base = OTHER; note = sugar modification: 2'-O-methoxyethylribose; note = backbone modification: 5'-phosphorothioate
  modified_base 15: mod_base = OTHER; mod_base = m5c; note = sugar modification: 2'-O-methoxyethylribose; note = backbone modification: 5'-phosphorothioate
  modified_base 16: mod_base = OTHER; mod_base = m5c; note = sugar modification: 2'-O-methoxyethylribose
tcttgtacttcatccc

SEQ ID NO: 613 - RNA, 16 nt, synthetic construct
  source 1..16: mol_type = other RNA; note = Antisense oligonucleotide
  modified_base 1: mod_base = OTHER; note = thymine; note = sugar modification: 2'-O-methoxyethylribose; note = backbone modification: 5'-phosphorothioate
  modified_base 2: mod_base = OTHER; note = backbone modification: 5'-phosphorothioate; note = sugar modification: 2'-O-methoxyethylribose; note = thymine
  modified_base 3: mod_base = OTHER; mod_base = m5c; note = backbone modification: 5'-phosphorothioate; note = sugar modification: 2'-O-methoxyethylribose
  modified_base 4: mod_base = OTHER; note = backbone modification: 5'-phosphorothioate; note = thymine; note = sugar modification: 2'-O-methoxyethylribose
  modified_base 5: mod_base = OTHER; note = backbone modification: 5'-phosphorothioate; note = sugar modification: 2'-O-methoxyethylribose; note = thymine
  modified_base 6: mod_base = OTHER; note = sugar modification: 2'-O-methoxyethylribose; note = backbone modification: 5'-phosphorothioate
  modified_base 7: mod_base = OTHER; note = thymine; note = backbone modification: 5'-phosphorothioate; note = sugar modification: 2'-O-methoxyethylribose
  modified_base 8: mod_base = OTHER; note = sugar modification: 2'-O-methoxyethylribose; note = backbone modification: 5'-phosphorothioate
  modified_base 9: mod_base = m5c; mod_base = OTHER; note = sugar modification: 2'-O-methoxyethylribose; note = backbone modification: 5'-phosphorothioate
  modified_base 10: mod_base = OTHER; note = backbone modification: 5'-phosphorothioate; note = thymine; note = sugar modification: 2'-O-methoxyethylribose
  modified_base 11: mod_base = OTHER; note = backbone modification: 5'-phosphorothioate; note = thymine; note = sugar modification: 2'-O-methoxyethylribose
  modified_base 12: mod_base = m5c; mod_base = OTHER; note = backbone modification: 5'-phosphorothioate; note = sugar modification: 2'-O-methoxyethylribose
  modified_base 13: mod_base = OTHER; note = sugar modification: 2'-O-methoxyethylribose; note = backbone modification: 5'-phosphorothioate
  modified_base 14: mod_base = OTHER; note = thymine; note = sugar modification: 2'-O-methoxyethylribose; note = backbone modification: 5'-phosphorothioate
  modified_base 15: mod_base = m5c; mod_base = OTHER; note = backbone modification: 5'-phosphorothioate; note = sugar modification: 2'-O-methoxyethylribose
  modified_base 16: mod_base = m5c; mod_base = OTHER; note = sugar modification: 2'-O-methoxyethylribose
ttcttgtacttcatcc

SEQ ID NO: 614 - RNA, 16 nt, synthetic construct
  source 1..16: mol_type = other RNA; note = Antisense oligonucleotide
  modified_base 1: mod_base = OTHER; note = sugar modification: 2'-O-methoxyethylribose; note = backbone modification: 5'-phosphorothioate
  modified_base 2: mod_base = OTHER; note = backbone modification: 5'-phosphorothioate; note = sugar modification: 2'-O-methoxyethylribose; note = thymine
  modified_base 3: mod_base = OTHER; note = sugar modification: 2'-O-methoxyethylribose; note = backbone modification: 5'-phosphorothioate; note = thymine
  modified_base 4: mod_base = OTHER; mod_base = m5c; note = backbone modification: 5'-phosphorothioate; note = sugar modification: 2'-O-methoxyethylribose
  modified_base 5: mod_base = OTHER; note = backbone modification: 5'-phosphorothioate; note = sugar modification: 2'-O-methoxyethylribose; note = thymine
  modified_base 6: mod_base = OTHER; note = sugar modification: 2'-O-methoxyethylribose; note = thymine; note = backbone modification: 5'-phosphorothioate
  modified_base 7: mod_base = OTHER; note = backbone modification: 5'-phosphorothioate; note = sugar modification: 2'-O-methoxyethylribose
  modified_base 8: mod_base = OTHER; note = sugar modification: 2'-O-methoxyethylribose; note = backbone modification: 5'-phosphorothioate; note = thymine
  modified_base 9: mod_base = OTHER; note = backbone modification: 5'-phosphorothioate; note = sugar modification: 2'-O-methoxyethylribose
  modified_base 10: mod_base = OTHER; mod_base = m5c; note = sugar modification: 2'-O-methoxyethylribose; note = backbone modification: 5'-phosphorothioate
  modified_base 11: mod_base = OTHER; note = sugar modification: 2'-O-methoxyethylribose; note = backbone modification: 5'-phosphorothioate; note = thymine
  modified_base 12: mod_base = OTHER; note = thymine; note = backbone modification: 5'-phosphorothioate; note = sugar modification: 2'-O-methoxyethylribose
  modified_base 13: mod_base = OTHER; mod_base = m5c; note = sugar modification: 2'-O-methoxyethylribose; note = backbone modification: 5'-phosphorothioate
  modified_base 14: mod_base = OTHER; note = backbone modification: 5'-phosphorothioate; note = sugar modification: 2'-O-methoxyethylribose
  modified_base 15: mod_base = OTHER; note = sugar modification: 2'-O-methoxyethylribose; note = thymine; note = backbone modification: 5'-phosphorothioate
  modified_base 16: mod_base = m5c; mod_base = OTHER; note = sugar modification: 2'-O-methoxyethylribose
gttcttgtacttcatc

SEQ ID NO: 615 - RNA, 16 nt, synthetic construct
  source 1..16: mol_type = other RNA; note = Antisense oligonucleotide
  modified_base 1: mod_base = OTHER; note = sugar modification: 2'-O-methoxyethylribose; note = backbone modification: 5'-phosphorothioate
  modified_base 2: mod_base = OTHER; note = backbone modification: 5'-phosphorothioate; note = sugar modification: 2'-O-methoxyethylribose
  modified_base 3: mod_base = OTHER; note = sugar modification: 2'-O-methoxyethylribose; note = backbone modification: 5'-phosphorothioate
  modified_base 4: mod_base = OTHER; note = backbone modification: 5'-phosphorothioate; note = thymine; note = sugar modification: 2'-O-methoxyethylribose
  modified_base 5: mod_base = OTHER; note = sugar modification: 2'-O-methoxyethylribose; note = backbone modification: 5'-phosphorothioate
  modified_base 6: mod_base = OTHER; note = backbone modification: 5'-phosphorothioate; note = sugar modification: 2'-O-methoxyethylribose; note = thymine
  modified_base 7: mod_base = OTHER; note = thymine; note = sugar modification: 2'-O-methoxyethylribose; note = backbone modification: 5'-phosphorothioate
  modified_base 8: mod_base = OTHER; mod_base = m5c; note = backbone modification: 5'-phosphorothioate; note = sugar modification: 2'-O-methoxyethylribose
  modified_base 9: mod_base = OTHER; note = backbone modification: 5'-phosphorothioate; note = thymine; note = sugar modification: 2'-O-methoxyethylribose
  modified_base 10: mod_base = OTHER; note = sugar modification: 2'-O-methoxyethylribose; note = thymine; note = backbone modification: 5'-phosphorothioate
  modified_base 11: mod_base = OTHER; note = sugar modification: 2'-O-methoxyethylribose; note = backbone modification: 5'-phosphorothioate
  modified_base 12: mod_base = OTHER; note = backbone modification: 5'-phosphorothioate; note = sugar modification: 2'-O-methoxyethylribose; note = thymine
  modified_base 13: mod_base = OTHER; note = sugar modification: 2'-O-methoxyethylribose; note = backbone modification: 5'-phosphorothioate
  modified_base 14: mod_base = OTHER; mod_base = m5c; note = sugar modification: 2'-O-methoxyethylribose; note = backbone modification: 5'-phosphorothioate
  modified_base 15: mod_base = OTHER; note = backbone modification: 5'-phosphorothioate; note = thymine; note = sugar modification: 2'-O-methoxyethylribose
  modified_base 16: mod_base = OTHER; note = thymine; note = sugar modification: 2'-O-methoxyethylribose
aggtgttcttgtactt

SEQ ID NO: 616 - RNA, 16 nt, synthetic construct
  source 1..16: mol_type = other RNA; note = Antisense oligonucleotide
  modified_base 1: mod_base = OTHER; note = backbone modification: 5'-phosphorothioate; note = sugar modification: 2'-O-methoxyethylribose
  modified_base 2: mod_base = OTHER; note = sugar modification: 2'-O-methoxyethylribose; note = backbone modification: 5'-phosphorothioate
  modified_base 3: mod_base = OTHER; note = backbone modification: 5'-phosphorothioate; note = sugar modification: 2'-O-methoxyethylribose
  modified_base 4: mod_base = OTHER; note = backbone modification: 5'-phosphorothioate; note = sugar modification: 2'-O-methoxyethylribose
  modified_base 5: mod_base = OTHER; note = thymine; note = sugar modification: 2'-O-methoxyethylribose; note = backbone modification: 5'-phosphorothioate
  modified_base 6: mod_base = OTHER; note = backbone modification: 5'-phosphorothioate; note = sugar modification: 2'-O-methoxyethylribose
  modified_base 7: mod_base = OTHER; note = sugar modification: 2'-O-methoxyethylribose; note = thymine; note = backbone modification: 5'-phosphorothioate
  modified_base 8: mod_base = OTHER; note = backbone modification: 5'-phosphorothioate; note = thymine; note = sugar modification: 2'-O-methoxyethylribose
  modified_base 9: mod_base = OTHER; mod_base = m5c; note = backbone modification: 5'-phosphorothioate; note = sugar modification: 2'-O-methoxyethylribose
  modified_base 10: mod_base = OTHER; note = backbone modification: 5'-phosphorothioate; note = sugar modification: 2'-O-methoxyethylribose; note = thymine
  modified_base 11: mod_base = OTHER; note = backbone modification: 5'-phosphorothioate; note = sugar modification: 2'-O-methoxyethylribose; note = thymine
  modified_base 12: mod_base = OTHER; note = backbone modification: 5'-phosphorothioate; note = sugar modification: 2'-O-methoxyethylribose
  modified_base 13: mod_base = OTHER; note = thymine; note = backbone modification: 5'-phosphorothioate; note = sugar modification: 2'-O-methoxyethylribose
  modified_base 14: mod_base = OTHER; note = backbone modification: 5'-phosphorothioate; note = sugar modification: 2'-O-methoxyethylribose
  modified_base 15: mod_base = OTHER; mod_base = m5c; note = backbone modification: 5'-phosphorothioate; note = sugar modification: 2'-O-methoxyethylribose
  modified_base 16: mod_base = OTHER; note = sugar modification: 2'-O-methoxyethylribose; note = thymine
aaggtgttcttgtact

SEQ ID NO: 617 - RNA, 16 nt, synthetic construct
  source 1..16: mol_type = other RNA; note = Antisense oligonucleotide
  modified_base 1: mod_base = m5c; mod_base = OTHER; note = sugar modification: lna; note = backbone modification: 5'-phosphorothioate
  modified_base 2: mod_base = OTHER; note = backbone modification: 5'-phosphorothioate; note = sugar modification: lna; note = thymine
  modified_base 3: mod_base = OTHER; note = sugar modification: lna; note = backbone modification: 5'-phosphorothioate; note = thymine
  modified_base 4: mod_base = OTHER; note = sugar modification: 2'-O-methoxyethylribose; note = backbone modification: 5'-phosphorothioate
  modified_base 5: mod_base = OTHER; note = thymine; note = backbone modification: 5'-phosphorothioate; note = sugar modification: 2'-O-methoxyethylribose
  modified_base 6: mod_base = OTHER; note = sugar modification: 2'-O-methoxyethylribose; note = backbone modification: 5'-phosphorothioate
  modified_base 7: mod_base = m5c; mod_base = OTHER; note = sugar modification: 2'-O-methoxyethylribose; note = backbone modification: 5'-phosphorothioate
  modified_base 8: mod_base = OTHER; note = sugar modification: 2'-O-methoxyethylribose; note = thymine; note = backbone modification: 5'-phosphorothioate
  modified_base 9: mod_base = OTHER; note = thymine; note = sugar modification: 2'-O-methoxyethylribose; note = backbone modification: 5'-phosphorothioate
  modified_base 10: mod_base = OTHER; mod_base = m5c; note = backbone modification: 5'-phosphorothioate; note = sugar modification: 2'-O-methoxyethylribose
  modified_base 11: mod_base = OTHER; note = sugar modification: 2'-O-methoxyethylribose; note = backbone modification: 5'-phosphorothioate
  modified_base 12: mod_base = OTHER; note = thymine; note = backbone modification: 5'-phosphorothioate; note = sugar modification: 2'-O-methoxyethylribose
  modified_base 13: mod_base = OTHER; mod_base = m5c; note = backbone modification: 5'-phosphorothioate; note = sugar modification: 2'-O-methoxyethylribose
  modified_base 14: mod_base = m5c; mod_base = OTHER; note = sugar modification: lna; note = backbone modification: 5'-phosphorothioate
  modified_base 15: mod_base = OTHER; mod_base = m5c; note = backbone modification: 5'-phosphorothioate; note = sugar modification: lna
  modified_base 16: mod_base = OTHER; note = sugar modification: lna
cttgtacttcatccca

SEQ ID NO: 618 - RNA, 16 nt, synthetic construct
  source 1..16: mol_type = other RNA; note = Antisense oligonucleotide
  modified_base 1: mod_base = OTHER; note = sugar modification: lna; note = thymine; note = backbone modification: 5'-phosphorothioate
  modified_base 2: mod_base = m5c; mod_base = OTHER; note = backbone modification: 5'-phosphorothioate; note = sugar modification: lna
  modified_base 3: mod_base = OTHER; note = thymine; note = backbone modification: 5'-phosphorothioate; note = sugar modification: lna
  modified_base 4: mod_base = OTHER; note = sugar modification: 2'-O-methoxyethylribose; note = backbone modification: 5'-phosphorothioate; note = thymine
  modified_base 5: mod_base = OTHER; note = sugar modification: 2'-O-methoxyethylribose; note = backbone modification: 5'-phosphorothioate
  modified_base 6: mod_base = OTHER; note = backbone modification: 5'-phosphorothioate; note = sugar modification: 2'-O-methoxyethylribose; note = thymine
  modified_base 7: mod_base = OTHER; note = backbone modification: 5'-phosphorothioate; note = sugar modification: 2'-O-methoxyethylribose
  modified_base 8: mod_base = OTHER; mod_base = m5c; note = backbone modification: 5'-phosphorothioate; note = sugar modification: 2'-O-methoxyethylribose
  modified_base 9: mod_base = OTHER; note = backbone modification: 5'-phosphorothioate; note = sugar modification: 2'-O-methoxyethylribose; note = thymine
  modified_base 10: mod_base = OTHER; note = sugar modification: 2'-O-methoxyethylribose; note = backbone modification: 5'-phosphorothioate; note = thymine
  modified_base 11: mod_base = OTHER; mod_base = m5c; note = sugar modification: 2'-O-methoxyethylribose; note = backbone modification: 5'-phosphorothioate
  modified_base 12: mod_base = OTHER; note = sugar modification: 2'-O-methoxyethylribose; note = backbone modification: 5'-phosphorothioate
  modified_base 13: mod_base = OTHER; note = thymine; note = sugar modification: 2'-O-methoxyethylribose; note = backbone modification: 5'-phosphorothioate
  modified_base 14: mod_base = m5c; mod_base = OTHER; note = sugar modification: lna; note = backbone modification: 5'-phosphorothioate
  modified_base 15: mod_base = OTHER; mod_base = m5c; note = sugar modification: lna; note = backbone modification: 5'-phosphorothioate
  modified_base 16: mod_base = OTHER; mod_base = m5c; note = sugar modification: lna
tcttgtacttcatccc

SEQ ID NO: 619 - RNA, 16 nt, synthetic construct
  source 1..16: mol_type = other RNA; note = Antisense oligonucleotide
  modified_base 1: mod_base = OTHER; note = sugar modification: lna; note = backbone modification: 5'-phosphorothioate; note = thymine
  modified_base 2: mod_base = OTHER; note = backbone modification: 5'-phosphorothioate; note = sugar modification: lna; note = thymine
  modified_base 3: mod_base = m5c; mod_base = OTHER; note = sugar modification: lna; note = backbone modification: 5'-phosphorothioate
  modified_base 4: mod_base = OTHER; note = thymine; note = backbone modification: 5'-phosphorothioate; note = sugar modification: 2'-O-methoxyethylribose
  modified_base 5: mod_base = OTHER; note = sugar modification: 2'-O-methoxyethylribose; note = backbone modification: 5'-phosphorothioate; note = thymine
  modified_base 6: mod_base = OTHER; note = sugar modification: 2'-O-methoxyethylribose; note = backbone modification: 5'-phosphorothioate
  modified_base 7: mod_base = OTHER; note = backbone modification: 5'-phosphorothioate; note = thymine; note = sugar modification: 2'-O-methoxyethylribose
  modified_base 8: mod_base = OTHER; note = backbone modification: 5'-phosphorothioate; note = sugar modification: 2'-O-methoxyethylribose
  modified_base 9: mod_base = m5c; mod_base = OTHER; note = backbone modification: 5'-phosphorothioate; note = sugar modification: 2'-O-methoxyethylribose
  modified_base 10: mod_base = OTHER; note = sugar modification: 2'-O-methoxyethylribose; note = backbone modification: 5'-phosphorothioate; note = thymine
  modified_base 11: mod_base = OTHER; note = thymine; note = backbone modification: 5'-phosphorothioate; note = sugar modification: 2'-O-methoxyethylribose
  modified_base 12: mod_base = m5c; mod_base = OTHER; note = sugar modification: 2'-O-methoxyethylribose; note = backbone modification: 5'-phosphorothioate
  modified_base 13: mod_base = OTHER; note = backbone modification: 5'-phosphorothioate; note = sugar modification: 2'-O-methoxyethylribose
  modified_base 14: mod_base = OTHER; note = backbone modification: 5'-phosphorothioate; note = sugar modification: lna; note = thymine
  modified_base 15: mod_base = OTHER; mod_base = m5c; note = sugar modification: lna; note = backbone modification: 5'-phosphorothioate
  modified_base 16: mod_base = m5c; mod_base = OTHER; note = sugar modification: lna
ttcttgtacttcatcc

SEQ ID NO: 620 - RNA, 16 nt, synthetic construct
  source 1..16: mol_type = other RNA; note = Antisense oligonucleotide
  modified_base 1: mod_base = OTHER; note = backbone modification: 5'-phosphorothioate; note = sugar modification: lna
  modified_base 2: mod_base = OTHER; note = sugar modification: lna; note = thymine; note = backbone modification: 5'-phosphorothioate
  modified_base 3: mod_base = OTHER; note = sugar modification: lna; note = backbone modification: 5'-phosphorothioate; note = thymine
  modified_base 4: mod_base = m5c; mod_base = OTHER; note = sugar modification: 2'-O-methoxyethylribose; note = backbone modification: 5'-phosphorothioate
  modified_base 5: mod_base = OTHER; note = backbone modification: 5'-phosphorothioate; note = sugar modification: 2'-O-methoxyethylribose; note = thymine
  modified_base 6: mod_base = OTHER; note = backbone modification: 5'-phosphorothioate; note = sugar modification: 2'-O-methoxyethylribose; note = thymine
  modified_base 7: mod_base = OTHER; note = backbone modification: 5'-phosphorothioate; note = sugar modification: 2'-O-methoxyethylribose
  modified_base 8: mod_base = OTHER; note = backbone modification: 5'-phosphorothioate; note = sugar modification: 2'-O-methoxyethylribose; note = thymine
  modified_base 9: mod_base = OTHER; note = sugar modification: 2'-O-methoxyethylribose; note = backbone modification: 5'-phosphorothioate
  modified_base 10: mod_base = m5c; mod_base = OTHER; note = backbone modification: 5'-phosphorothioate; note = sugar modification: 2'-O-methoxyethylribose
  modified_base 11: mod_base = OTHER; note = sugar modification: 2'-O-methoxyethylribose; note = backbone modification: 5'-phosphorothioate; note = thymine
  modified_base 12: mod_base = OTHER; note = sugar modification: 2'-O-methoxyethylribose; note = thymine; note = backbone modification: 5'-phosphorothioate
  modified_base 13: mod_base = m5c; mod_base = OTHER; note = sugar modification: 2'-O-methoxyethylribose; note = backbone modification: 5'-phosphorothioate
  modified_base 14: mod_base = OTHER; note = backbone modification: 5'-phosphorothioate; note = sugar modification: lna
  modified_base 15: mod_base = OTHER; note = backbone modification: 5'-phosphorothioate; note = thymine; note = sugar modification: lna
  modified_base 16: mod_base = OTHER; mod_base = m5c; note = sugar modification: lna
gttcttgtacttcatc

SEQ ID NO: 621 - RNA, 16 nt, synthetic construct
  source 1..16: mol_type = other RNA; note = Antisense oligonucleotide
  modified_base 1: mod_base = OTHER; note = sugar modification: lna; note = backbone modification: 5'-phosphorothioate
  modified_base 2: mod_base = OTHER; note = backbone modification: 5'-phosphorothioate; note = sugar modification: lna
  modified_base 3: mod_base = OTHER; note = sugar modification: lna; note = backbone modification: 5'-phosphorothioate
  modified_base 4: mod_base = OTHER; note = sugar modification: 2'-O-methoxyethylribose; note = thymine; note = backbone modification: 5'-phosphorothioate
  modified_base 5: mod_base = OTHER; note = sugar modification: 2'-O-methoxyethylribose; note = backbone modification: 5'-phosphorothioate
  modified_base 6: mod_base = OTHER; note = sugar modification: 2'-O-methoxyethylribose; note = thymine; note = backbone modification: 5'-phosphorothioate
  modified_base 7: mod_base = OTHER; note = backbone modification: 5'-phosphorothioate; note = thymine; note = sugar modification: 2'-O-methoxyethylribose
  modified_base 8: mod_base = m5c; mod_base = OTHER; note = sugar modification: 2'-O-methoxyethylribose; note = backbone modification: 5'-phosphorothioate
  modified_base 9: mod_base = OTHER; note = backbone modification: 5'-phosphorothioate; note = sugar modification: 2'-O-methoxyethylribose; note = thymine
  modified_base 10: mod_base = OTHER; note = backbone modification: 5'-phosphorothioate; note = sugar modification: 2'-O-methoxyethylribose; note = thymine
  modified_base 11: mod_base = OTHER; note = backbone modification: 5'-phosphorothioate; note = sugar modification: 2'-O-methoxyethylribose
  modified_base 12: mod_base = OTHER; note = thymine; note = backbone modification: 5'-phosphorothioate; note = sugar modification: 2'-O-methoxyethylribose
  modified_base 13: mod_base = OTHER; note = backbone modification: 5'-phosphorothioate; note = sugar modification: 2'-O-methoxyethylribose
  modified_base 14: mod_base = OTHER; mod_base = m5c; note = sugar modification: lna; note = backbone modification: 5'-phosphorothioate
  modified_base 15: mod_base = OTHER; note = backbone modification: 5'-phosphorothioate; note = thymine; note = sugar modification: lna
  modified_base 16: mod_base = OTHER; note = thymine; note = sugar modification: lna
aggtgttcttgtactt

SEQ ID NO: 622 - RNA, 16 nt, synthetic construct
  source 1..16: mol_type = other RNA; note = Antisense oligonucleotide
  modified_base 1: mod_base = OTHER; note = sugar modification: lna; note = backbone modification: 5'-phosphorothioate
  modified_base 2: mod_base = OTHER; note = backbone modification: 5'-phosphorothioate; note = sugar modification: lna
  modified_base 3: mod_base = OTHER; note = backbone modification: 5'-phosphorothioate; note = sugar modification: lna
  modified_base 4: mod_base = OTHER; note = sugar modification: 2'-O-methoxyethylribose; note = backbone modification: 5'-phosphorothioate
  modified_base 5: mod_base = OTHER; note = sugar modification: 2'-O-methoxyethylribose; note = backbone modification: 5'-phosphorothioate; note = thymine
  modified_base 6: mod_base = OTHER; note = sugar modification: 2'-O-methoxyethylribose; note = backbone modification: 5'-phosphorothioate
  modified_base 7: mod_base = OTHER; note = thymine; note = sugar modification: 2'-O-methoxyethylribose; note = backbone modification: 5'-phosphorothioate
  modified_base 8: mod_base = OTHER; note = sugar modification: 2'-O-methoxyethylribose; note = backbone modification: 5'-phosphorothioate; note = thymine
  modified_base 9: mod_base = m5c; mod_base = OTHER; note = sugar modification: 2'-O-methoxyethylribose; note = backbone modification: 5'-phosphorothioate
  modified_base 10: mod_base = OTHER; note = thymine; note = backbone modification: 5'-phosphorothioate; note = sugar modification: 2'-O-methoxyethylribose
  modified_base 11: mod_base = OTHER; note = backbone modification: 5'-phosphorothioate; note = thymine; note = sugar modification: 2'-O-methoxyethylribose
  modified_base 12: mod_base = OTHER; note = backbone modification: 5'-phosphorothioate; note = sugar modification: 2'-O-methoxyethylribose
  modified_base 13: mod_base = OTHER; note = sugar modification: 2'-O-methoxyethylribose; note = backbone modification: 5'-phosphorothioate; note = thymine
  modified_base 14: mod_base = OTHER; note = backbone modification: 5'-phosphorothioate; note = sugar modification: lna
  modified_base 15: mod_base = OTHER; mod_base = m5c; note = backbone modification: 5'-phosphorothioate; note = sugar modification: lna
  modified_base 16: mod_base = OTHER; note = sugar modification: lna; note = thymine
aaggtgttcttgtact

SEQ ID NO: 623 - RNA, 17 nt, synthetic construct
  source 1..17: mol_type = other RNA; note = Antisense oligonucleotide
  modified_base 1: mod_base = OTHER; note = backbone modification: 5'-phosphorothioate; note = sugar modification: 2'-O-methoxyethylribose; note = thymine
  modified_base 2: mod_base = m5c; mod_base = OTHER; note = sugar modification: 2'-O-methoxyethylribose; note = backbone modification: 5'-phosphorothioate
  modified_base 3: mod_base = OTHER; note = sugar modification: 2'-O-methoxyethylribose; note = backbone modification: 5'-phosphorothioate; note = thymine
  modified_base 4: mod_base = OTHER; note = thymine; note = backbone modification: 5'-phosphorothioate; note = sugar modification: 2'-O-methoxyethylribose
  modified_base 5: mod_base = OTHER; note = backbone modification: 5'-phosphorothioate; note = sugar modification: 2'-O-methoxyethylribose
  modified_base 6: mod_base = OTHER; note = thymine; note = sugar modification: 2'-O-methoxyethylribose; note = backbone modification: 5'-phosphorothioate
  modified_base 7: mod_base = OTHER; note = backbone modification: 5'-phosphorothioate; note = sugar modification: 2'-O-methoxyethylribose
  modified_base 8: mod_base = OTHER; mod_base = m5c; note = sugar modification: 2'-O-methoxyethylribose; note = backbone modification: 5'-phosphorothioate
  modified_base 9: mod_base = OTHER; note = sugar modification: 2'-O-methoxyethylribose; note = thymine; note = backbone modification: 5'-phosphorothioate
  modified_base 10: mod_base = OTHER; note = backbone modification: 5'-phosphorothioate; note = sugar modification: 2'-O-methoxyethylribose; note = thymine
  modified_base 11: mod_base = OTHER; mod_base = m5c; note = sugar modification: 2'-O-methoxyethylribose; note = backbone modification: 5'-phosphorothioate
  modified_base 12: mod_base = OTHER; note = backbone modification: 5'-phosphorothioate; note = sugar modification: 2'-O-methoxyethylribose
  modified_base 13: mod_base = OTHER; note = thymine; note = backbone modification: 5'-phosphorothioate; note = sugar modification: 2'-O-methoxyethylribose
  modified_base 14: mod_base = OTHER; mod_base = m5c; note = backbone modification: 5'-phosphorothioate; note = sugar modification: 2'-O-methoxyethylribose
  modified_base 15: mod_base = OTHER; mod_base = m5c; note = backbone modification: 5'-phosphorothioate; note = sugar modification: 2'-O-methoxyethylribose
  modified_base 16: mod_base = m5c; mod_base = OTHER; note = backbone modification: 5'-phosphorothioate; note = sugar modification: 2'-O-methoxyethylribose
  modified_base 17: mod_base = OTHER; note = sugar modification: 2'-O-methoxyethylribose
tcttgtacttcatccca

SEQ ID NO: 624 - RNA, 17 nt, synthetic construct
  source 1..17: mol_type = other RNA; note = Antisense oligonucleotide
  modified_base 1: mod_base = OTHER; note = backbone modification: 5'-phosphorothioate; note = sugar modification: 2'-O-methoxyethylribose; note = thymine
  modified_base 2: mod_base = OTHER; note = thymine; note = sugar modification: 2'-O-methoxyethylribose; note = backbone modification: 5'-phosphorothioate
  modified_base 3: mod_base = m5c; mod_base = OTHER; note = backbone modification: 5'-phosphorothioate; note = sugar modification: 2'-O-methoxyethylribose
  modified_base 4: mod_base = OTHER; note = backbone modification: 5'-phosphorothioate; note = thymine; note = sugar modification: 2'-O-methoxyethylribose
  modified_base 5: mod_base = OTHER; note = thymine; note = backbone modification: 5'-phosphorothioate; note = sugar modification: 2'-O-methoxyethylribose
  modified_base 6: mod_base = OTHER; note = sugar modification: 2'-O-methoxyethylribose; note = backbone modification: 5'-phosphorothioate
  modified_base 7: mod_base = OTHER; note = thymine; note = sugar modification: 2'-O-methoxyethylribose; note = backbone modification: 5'-phosphorothioate
  modified_base 8: mod_base = OTHER; note = sugar modification: 2'-O-methoxyethylribose; note = backbone modification: 5'-phosphorothioate
  modified_base 9: mod_base = m5c; mod_base = OTHER; note = backbone modification: 5'-phosphorothioate; note = sugar modification: 2'-O-methoxyethylribose
  modified_base 10: mod_base = OTHER; note = backbone modification: 5'-phosphorothioate; note = sugar modification: 2'-O-methoxyethylribose; note = thymine
  modified_base 11: mod_base = OTHER; note = backbone modification: 5'-phosphorothioate; note = sugar modification: 2'-O-methoxyethylribose; note = thymine
  modified_base 12: mod_base = m5c; mod_base = OTHER; note = backbone modification: 5'-phosphorothioate; note = sugar modification: 2'-O-methoxyethylribose
  modified_base 13: mod_base = OTHER; note = sugar modification: 2'-O-methoxyethylribose; note = backbone modification: 5'-phosphorothioate
  modified_base 14: mod_base = OTHER; note = backbone modification: 5'-phosphorothioate; note = thymine; note = sugar modification: 2'-O-methoxyethylribose
  modified_base 15: mod_base = OTHER; mod_base = m5c; note = backbone modification: 5'-phosphorothioate; note = sugar modification: 2'-O-methoxyethylribose
  modified_base 16: mod_base = m5c; mod_base = OTHER; note = backbone modification: 5'-phosphorothioate; note = sugar modification: 2'-O-methoxyethylribose
  modified_base 17: mod_base = m5c; mod_base = OTHER; note = sugar modification: 2'-O-methoxyethylribose
ttcttgtacttcatccc

SEQ ID NO: 625 - RNA, 17 nt, synthetic construct
  source 1..17: mol_type = other RNA; note = Antisense oligonucleotide
  modified_base 1: mod_base = OTHER; note = sugar modification: 2'-O-methoxyethylribose; note = backbone modification: 5'-phosphorothioate
  modified_base 2: mod_base = OTHER; note = backbone modification: 5'-phosphorothioate; note = thymine; note = sugar modification: 2'-O-methoxyethylribose
  modified_base 3: mod_base = OTHER; note = sugar modification: 2'-O-methoxyethylribose; note = thymine; note = backbone modification: 5'-phosphorothioate
  modified_base 4: mod_base = OTHER; mod_base = m5c; note = sugar modification: 2'-O-methoxyethylribose; note = backbone modification: 5'-phosphorothioate
  modified_base 5: mod_base = OTHER; note = backbone modification: 5'-phosphorothioate; note = thymine; note = sugar modification: 2'-O-methoxyethylribose
  modified_base 6: mod_base = OTHER; note = sugar modification: 2'-O-methoxyethylribose; note = backbone modification: 5'-phosphorothioate; note = thymine
  modified_base 7: mod_base = OTHER; note = sugar modification: 2'-O-methoxyethylribose; note = backbone modification: 5'-phosphorothioate
  modified_base 8: mod_base = OTHER; note = backbone modification: 5'-phosphorothioate; note = sugar modification: 2'-O-methoxyethylribose; note = thymine
  modified_base 9: mod_base = OTHER; note = backbone modification: 5'-phosphorothioate; note = sugar modification: 2'-O-methoxyethylribose
  modified_base 10: mod_base = m5c; mod_base = OTHER; note = backbone modification: 5'-phosphorothioate; note = sugar modification: 2'-O-methoxyethylribose
  modified_base 11: mod_base = OTHER; note = thymine; note = backbone modification: 5'-phosphorothioate; note = sugar modification: 2'-O-methoxyethylribose
  modified_base 12: mod_base = OTHER; note = thymine; note = sugar modification: 2'-O-methoxyethylribose; note = backbone modification: 5'-phosphorothioate
  modified_base 13: mod_base = OTHER; mod_base = m5c; note = sugar modification: 2'-O-methoxyethylribose; note = backbone modification: 5'-phosphorothioate
  modified_base 14: mod_base = OTHER; note = sugar modification: 2'-O-methoxyethylribose; note = backbone modification: 5'-phosphorothioate
  modified_base 15: mod_base = OTHER; note = thymine; note = sugar modification: 2'-O-methoxyethylribose; note = backbone modification: 5'-phosphorothioate
  modified_base 16: mod_base = OTHER; mod_base = m5c; note = sugar modification: 2'-O-methoxyethylribose; note = backbone modification: 5'-phosphorothioate
  modified_base 17: mod_base = m5c; mod_base = OTHER; note = sugar modification: 2'-O-methoxyethylribose
gttcttgtacttcatcc

SEQ ID NO: 626 - RNA, 17 nt, synthetic construct
  source 1..17: mol_type = other RNA; note = Antisense oligonucleotide
  modified_base 1: mod_base = OTHER; note = backbone modification: 5'-phosphorothioate; note = sugar modification: 2'-O-methoxyethylribose; note = thymine
  modified_base 2: mod_base = OTHER; note = backbone modification: 5'-phosphorothioate; note = sugar modification: 2'-O-methoxyethylribose
  modified_base 3: mod_base = OTHER; note = thymine; note = backbone modification: 5'-phosphorothioate; note = sugar modification: 2'-O-methoxyethylribose
  modified_base 4: mod_base = OTHER; note = thymine; note = backbone modification: 5'-phosphorothioate; note = sugar modification: 2'-O-methoxyethylribose
  modified_base 5: mod_base = m5c; mod_base = OTHER; note = sugar modification: 2'-O-methoxyethylribose; note = backbone modification: 5'-phosphorothioate
  modified_base 6: mod_base = OTHER; note = thymine; note = sugar modification: 2'-O-methoxyethylribose; note = backbone modification: 5'-phosphorothioate
  modified_base 7: mod_base = OTHER; note = backbone modification: 5'-phosphorothioate; note = sugar modification: 2'-O-methoxyethylribose; note = thymine
  modified_base 8: mod_base = OTHER; note = sugar modification: 2'-O-methoxyethylribose; note = backbone modification: 5'-phosphorothioate
  modified_base 9: mod_base = OTHER; note = thymine; note = backbone modification: 5'-phosphorothioate; note = sugar modification: 2'-O-methoxyethylribose
  modified_base 10: mod_base = OTHER; note = backbone modification: 5'-phosphorothioate; note = sugar modification: 2'-O-methoxyethylribose
  modified_base 11: mod_base = OTHER; mod_base = m5c; note = backbone modification: 5'-phosphorothioate; note = sugar modification: 2'-O-methoxyethylribose
  modified_base 12: mod_base = OTHER; note = sugar modification: 2'-O-methoxyethylribose; note = backbone modification: 5'-phosphorothioate; note = thymine
  modified_base 13: mod_base = OTHER; note = thymine; note = sugar modification: 2'-O-methoxyethylribose; note = backbone modification: 5'-phosphorothioate
  modified_base 14: mod_base = m5c; mod_base = OTHER; note = backbone modification: 5'-phosphorothioate; note = sugar modification: 2'-O-methoxyethylribose
  modified_base 15: mod_base = OTHER; note = sugar modification: 2'-O-methoxyethylribose; note = backbone modification: 5'-phosphorothioate
  modified_base 16: mod_base = OTHER; note = thymine; note = sugar modification: 2'-O-methoxyethylribose; note = backbone modification: 5'-phosphorothioate
  modified_base 17: mod_base = m5c; mod_base = OTHER; note = sugar modification: 2'-O-methoxyethylribose
tgttcttgtacttcatc

SEQ ID NO: 627 - RNA, 17 nt, synthetic construct
  source 1..17: mol_type = other RNA; note = Antisense oligonucleotide
  modified_base 1: mod_base = OTHER; note = sugar modification: 2'-O-methoxyethylribose; note = backbone modification: 5'-phosphorothioate
  modified_base 2: mod_base = OTHER; note = sugar modification: 2'-O-methoxyethylribose; note = backbone modification: 5'-phosphorothioate; note = thymine
  modified_base 3: mod_base = OTHER; note = sugar modification: 2'-O-methoxyethylribose; note = backbone modification: 5'-phosphorothioate
  modified_base 4: mod_base = OTHER; note = thymine; note = sugar modification: 2'-O-methoxyethylribose; note = backbone modification: 5'-phosphorothioate
  modified_base 5: mod_base = OTHER; note = thymine; note = backbone modification: 5'-phosphorothioate; note = sugar modification: 2'-O-methoxyethylribose
  modified_base 6: mod_base = m5c; mod_base = OTHER; note = backbone modification: 5'-phosphorothioate; note = sugar modification: 2'-O-methoxyethylribose
  modified_base 7: mod_base = OTHER; note = thymine; note = backbone modification: 5'-phosphorothioate; note = sugar modification: 2'-O-methoxyethylribose
  modified_base 8: mod_base = OTHER; note = sugar modification: 2'-O-methoxyethylribose; note = thymine; note = backbone modification: 5'-phosphorothioate
  modified_base 9: mod_base = OTHER; note = backbone modification: 5'-phosphorothioate; note = sugar modification: 2'-O-methoxyethylribose
  modified_base 10: mod_base = OTHER; note = backbone modification: 5'-phosphorothioate; note = thymine; note = sugar modification: 2'-O-methoxyethylribose
  modified_base 11: mod_base = OTHER; note = sugar modification: 2'-O-methoxyethylribose; note = backbone modification: 5'-phosphorothioate
  modified_base 12: mod_base = m5c; mod_base = OTHER; note = sugar modification: 2'-O-methoxyethylribose; note = backbone modification: 5'-phosphorothioate
  modified_base 13: mod_base = OTHER; note = sugar modification: 2'-O-methoxyethylribose; note = thymine; note = backbone modification: 5'-phosphorothioate
  modified_base 14: mod_base = OTHER; note = thymine; note = sugar modification: 2'-O-methoxyethylribose; note = backbone modification: 5'-phosphorothioate
  modified_base 15: mod_base = m5c; mod_base = OTHER; note = backbone modification: 5'-phosphorothioate; note = sugar modification: 2'-O-methoxyethylribose
  modified_base 16: mod_base = OTHER; note = backbone modification: 5'-phosphorothioate; note = sugar modification: 2'-O-methoxyethylribose
  modified_base 17: mod_base = OTHER; note = sugar modification: 2'-O-methoxyethylribose; note = thymine
gtgttcttgtacttcat

SEQ ID NO: 628 - RNA, 17 nt, synthetic construct
  source 1..17: mol_type = other RNA; note = Antisense oligonucleotide
  modified_base 1: mod_base = OTHER; note = backbone modification: 5'-phosphorothioate; note = sugar modification: 2'-O-methoxyethylribose
  modified_base 2: mod_base = OTHER; note = sugar modification: 2'-O-methoxyethylribose; note = backbone modification: 5'-phosphorothioate
  modified_base 3: mod_base = OTHER; note = backbone modification: 5'-phosphorothioate; note = thymine; note = sugar modification: 2'-O-methoxyethylribose
  modified_base 4: mod_base = OTHER; note = backbone modification: 5'-phosphorothioate; note = sugar modification: 2'-O-methoxyethylribose
  modified_base 5: mod_base = OTHER; note = sugar modification: 2'-O-methoxyethylribose; note = thymine; note = backbone modification: 5'-phosphorothioate
  modified_base 6: mod_base = OTHER; note = backbone modification: 5'-phosphorothioate; note = sugar modification: 2'-O-methoxyethylribose; note = thymine
  modified_base 7: mod_base = m5c; mod_base = OTHER; note = sugar modification: 2'-O-methoxyethylribose; note = backbone modification: 5'-phosphorothioate
  modified_base 8: mod_base = OTHER; note = backbone modification: 5'-phosphorothioate; note = sugar modification: 2'-O-methoxyethylribose; note = thymine
  modified_base 9: mod_base = OTHER; note = backbone modification: 5'-phosphorothioate; note = sugar modification: 2'-O-methoxyethylribose; note = thymine
  modified_base 10: mod_base = OTHER; note = sugar modification: 2'-O-methoxyethylribose; note = backbone modification: 5'-phosphorothioate
  modified_base 11: mod_base = OTHER; note = sugar modification: 2'-O-methoxyethylribose; note = thymine; note = backbone modification: 5'-phosphorothioate
  modified_base 12: mod_base = OTHER; note = backbone modification: 5'-phosphorothioate; note = sugar modification: 2'-O-methoxyethylribose
  modified_base 13: mod_base = OTHER; mod_base = m5c; note = backbone modification: 5'-phosphorothioate; note = sugar modification: 2'-O-methoxyethylribose
  modified_base 14: mod_base = OTHER; note = sugar modification: 2'-O-methoxyethylribose; note = backbone modification: 5'-phosphorothioate; note = thymine
  modified_base 15: mod_base = OTHER; note = backbone modification: 5'-phosphorothioate; note = sugar modification: 2'-O-methoxyethylribose; note = thymine
  modified_base 16: mod_base = m5c; mod_base = OTHER; note = sugar modification: 2'-O-methoxyethylribose; note = backbone modification: 5'-phosphorothioate
  modified_base 17: mod_base = OTHER; note = sugar modification: 2'-O-methoxyethylribose
ggtgttcttgtacttca

SEQ ID NO: 629 - RNA, 17 nt, synthetic construct
  source 1..17: mol_type = other RNA; note = Antisense oligonucleotide
  modified_base 1: mod_base = OTHER; note = sugar modification: 2'-O-methoxyethylribose; note = backbone modification: 5'-phosphorothioate
  modified_base 2: mod_base = OTHER; note = sugar modification: 2'-O-methoxyethylribose; note = backbone modification: 5'-phosphorothioate
  modified_base 3: mod_base = OTHER; note = sugar modification: 2'-O-methoxyethylribose; note = backbone modification: 5'-phosphorothioate
  modified_base 4: mod_base = OTHER; note = thymine; note = sugar modification: 2'-O-methoxyethylribose; note = backbone modification: 5'-phosphorothioate
  modified_base 5: mod_base = OTHER; note = backbone modification: 5'-phosphorothioate; note = sugar modification: 2'-O-methoxyethylribose
  modified_base 6: mod_base = OTHER; note = sugar modification: 2'-O-methoxyethylribose; note = backbone modification: 5'-phosphorothioate; note = thymine
  modified_base 7: mod_base = OTHER; note = sugar modification: 2'-O-methoxyethylribose; note = thymine; note = backbone modification: 5'-phosphorothioate
  modified_base 8: mod_base = OTHER; mod_base = m5c; note = backbone modification: 5'-phosphorothioate; note = sugar modification: 2'-O-methoxyethylribose
  modified_base 9: mod_base = OTHER; note = sugar modification: 2'-O-methoxyethylribose; note = thymine; note = backbone modification: 5'-phosphorothioate
  modified_base 10: mod_base = OTHER; note = backbone modification: 5'-phosphorothioate; note = sugar modification: 2'-O-methoxyethylribose; note = thymine
  modified_base 11: mod_base = OTHER; note = sugar modification: 2'-O-methoxyethylribose; note = backbone modification: 5'-phosphorothioate
  modified_base 12: mod_base = OTHER; note = thymine; note = backbone modification: 5'-phosphorothioate; note = sugar modification: 2'-O-methoxyethylribose
  modified_base 13: mod_base = OTHER; note = sugar modification: 2'-O-methoxyethylribose; note = backbone modification: 5'-phosphorothioate
  modified_base 14: mod_base = m5c; mod_base = OTHER; note = sugar modification: 2'-O-methoxyethylribose; note = backbone modification: 5'-phosphorothioate
  modified_base 15: mod_base = OTHER; note = thymine; note = sugar modification: 2'-O-methoxyethylribose; note = backbone modification: 5'-phosphorothioate
  modified_base 16: mod_base = OTHER; note = backbone modification: 5'-phosphorothioate; note = sugar modification: 2'-O-methoxyethylribose; note = thymine
  modified_base 17: mod_base = OTHER; mod_base = m5c; note = sugar modification: 2'-O-methoxyethylribose
aggtgttcttgtacttc

SEQ ID NO: 630 - RNA, 17 nt, synthetic construct
  source 1..17: mol_type = other RNA; note = Antisense oligonucleotide
  modified_base 1: mod_base = OTHER; note = backbone modification: 5'-phosphorothioate; note = sugar modification: 2'-O-methoxyethylribose
  modified_base 2: mod_base = OTHER; note = backbone modification: 5'-phosphorothioate; note = sugar modification: 2'-O-methoxyethylribose
  modified_base 3: mod_base = OTHER; note = sugar modification: 2'-O-methoxyethylribose; note = backbone modification: 5'-phosphorothioate
  modified_base 4: mod_base = OTHER; note = sugar modification: 2'-O-methoxyethylribose; note = backbone modification: 5'-phosphorothioate
  modified_base 5: mod_base = OTHER; note = backbone modification: 5'-phosphorothioate; note = thymine; note = sugar modification: 2'-O-methoxyethylribose
  modified_base 6: mod_base = OTHER; note = sugar modification: 2'-O-methoxyethylribose; note = backbone modification: 5'-phosphorothioate
  modified_base 7: mod_base = OTHER; note = sugar modification: 2'-O-methoxyethylribose; note = backbone modification: 5'-phosphorothioate; note = thymine
  modified_base 8: mod_base = OTHER; note = sugar modification: 2'-O-methoxyethylribose; note = backbone modification: 5'-phosphorothioate; note = thymine
  modified_base 9: mod_base = m5c; mod_base = OTHER; note = backbone modification: 5'-phosphorothioate; note = sugar modification: 2'-O-methoxyethylribose
  modified_base 10: mod_base = OTHER; note = thymine; note = backbone modification: 5'-phosphorothioate; note = sugar modification: 2'-O-methoxyethylribose
  modified_base 11: mod_base = OTHER; note = sugar modification: 2'-O-methoxyethylribose; note = thymine; note = backbone modification: 5'-phosphorothioate
  modified_base 12: mod_base = OTHER; note = backbone modification: 5'-phosphorothioate; note = sugar modification: 2'-O-methoxyethylribose
  modified_base 13: mod_base = OTHER; note = thymine; note = backbone modification: 5'-phosphorothioate; note = sugar modification: 2'-O-methoxyethylribose
  modified_base 14: mod_base = OTHER; note = backbone modification: 5'-phosphorothioate; note = sugar modification: 2'-O-methoxyethylribose
  modified_base 15: mod_base = OTHER; mod_base = m5c; note = sugar modification: 2'-O-methoxyethylribose; note = backbone modification: 5'-phosphorothioate
  modified_base 16: mod_base = OTHER; note = sugar modification: 2'-O-methoxyethylribose; note = thymine; note = backbone modification: 5'-phosphorothioate
  modified_base 17: mod_base = OTHER; note = thymine; note = sugar modification: 2'-O-methoxyethylribose
aaggtgttcttgtactt

SEQ ID NO: 631 - RNA, 17 nt, synthetic construct
  source 1..17: mol_type = other RNA; note = Antisense oligonucleotide
  modified_base 1: mod_base = OTHER; note = sugar modification: lna; note = backbone modification: 5'-phosphorothioate; note = thymine
  modified_base 2: mod_base = m5c; mod_base = OTHER; note = backbone modification: 5'-phosphorothioate; note = sugar modification: lna
  modified_base 3: mod_base = OTHER; note = backbone modification: 5'-phosphorothioate; note = thymine; note = sugar modification: lna
  modified_base 4: mod_base = OTHER; note = thymine; note = backbone modification: 5'-phosphorothioate; note = sugar modification: 2'-O-methoxyethylribose
  modified_base 5: mod_base = OTHER; note = sugar modification: 2'-O-methoxyethylribose; note = backbone modification: 5'-phosphorothioate
  modified_base 6: mod_base = OTHER; note = thymine; note = backbone modification: 5'-phosphorothioate; note = sugar modification: 2'-O-methoxyethylribose
  modified_base 7: mod_base = OTHER; note = sugar modification: 2'-O-methoxyethylribose; note = backbone modification: 5'-phosphorothioate
  modified_base 8: mod_base = m5c; mod_base = OTHER; note = backbone modification: 5'-phosphorothioate; note = sugar modification: 2'-O-methoxyethylribose
  modified_base 9: mod_base = OTHER; note = backbone modification: 5'-phosphorothioate; note = sugar modification: 2'-O-methoxyethylribose; note = thymine
  modified_base 10: mod_base = OTHER; note = thymine; note = sugar modification: 2'-O-methoxyethylribose; note = backbone modification: 5'-phosphorothioate
  modified_base 11: mod_base = OTHER; mod_base = m5c; note = sugar modification: 2'-O-methoxyethylribose; note = backbone modification: 5'-phosphorothioate
  modified_base 12: mod_base = OTHER; note = sugar modification: 2'-O-methoxyethylribose; note = backbone modification: 5'-phosphorothioate
  modified_base 13: mod_base = OTHER; note = sugar modification: 2'-O-methoxyethylribose; note = thymine; note = backbone modification: 5'-phosphorothioate
  modified_base 14: mod_base = m5c; mod_base = OTHER; note = backbone modification: 5'-phosphorothioate; note = sugar modification: 2'-O-methoxyethylribose
  modified_base 15: mod_base = m5c; mod_base = OTHER; note = backbone modification: 5'-phosphorothioate; note = sugar modification: lna
  modified_base 16: mod_base = m5c; mod_base = OTHER; note = backbone modification: 5'-phosphorothioate; note = sugar modification: lna
  modified_base 17: mod_base = OTHER; note = sugar modification: lna
tcttgtacttcatccca

SEQ ID NO: 632 - RNA, 17 nt, synthetic construct
  source 1..17: mol_type = other RNA; note = Antisense oligonucleotide
  modified_base 1: mod_base = OTHER; note = backbone modification: 5'-phosphorothioate; note = sugar modification: lna; note = thymine
  modified_base 2: mod_base = OTHER; note = backbone modification: 5'-phosphorothioate; note = thymine; note = sugar modification: lna
  modified_base 3: mod_base = OTHER; mod_base = m5c; note = backbone modification: 5'-phosphorothioate; note = sugar modification: lna
  modified_base 4: mod_base = OTHER; note = backbone modification: 5'-phosphorothioate; note = sugar modification: 2'-O-methoxyethylribose; note = thymine
  modified_base 5: mod_base = OTHER; note = sugar modification: 2'-O-methoxyethylribose; note = backbone modification: 5'-phosphorothioate; note = thymine
  modified_base 6: mod_base = OTHER; note = sugar modification: 2'-O-methoxyethylribose; note = backbone modification: 5'-phosphorothioate
  modified_base 7: mod_base = OTHER; note = thymine; note = sugar modification: 2'-O-methoxyethylribose; note = backbone modification: 5'-phosphorothioate
  modified_base 8: mod_base = OTHER; note = backbone modification: 5'-phosphorothioate; note = sugar modification: 2'-O-methoxyethylribose
  modified_base 9: mod_base = OTHER; mod_base = m5c; note = sugar modification: 2'-O-methoxyethylribose; note = backbone modification: 5'-phosphorothioate
  modified_base 10: mod_base = OTHER; note = thymine; note = backbone modification: 5'-phosphorothioate; note = sugar modification: 2'-O-methoxyethylribose
  modified_base 11: mod_base = OTHER; note = thymine; note = backbone modification: 5'-phosphorothioate; note = sugar modification: 2'-O-methoxyethylribose
  modified_base 12: mod_base = OTHER; mod_base = m5c; note = backbone modification: 5'-phosphorothioate; note = sugar modification: 2'-O-methoxyethylribose
  modified_base 13: mod_base = OTHER; note = sugar modification: 2'-O-methoxyethylribose; note = backbone modification: 5'-phosphorothioate
  modified_base 14: mod_base = OTHER; note = sugar modification: 2'-O-methoxyethylribose; note = backbone modification: 5'-phosphorothioate; note = thymine
  modified_base 15: mod_base = OTHER; mod_base = m5c; note = sugar modification: lna; note = backbone modification: 5'-phosphorothioate
  modified_base 16: mod_base = OTHER; mod_base = m5c; note = sugar modification: lna; note = backbone modification: 5'-phosphorothioate
  modified_base 17: mod_base = OTHER; mod_base = m5c; note = sugar modification: lna
ttcttgtacttcatccc

SEQ ID NO: 633 - RNA, 17 nt, synthetic construct
  source 1..17: mol_type = other RNA; note = Antisense oligonucleotide
  modified_base 1: mod_base = OTHER; note = sugar modification: lna; note = backbone modification: 5'-phosphorothioate
  modified_base 2: mod_base = OTHER; note = backbone modification: 5'-phosphorothioate; note = sugar modification: lna; note = thymine
  modified_base 3: mod_base = OTHER; note = sugar modification: lna; note = backbone modification: 5'-phosphorothioate; note = thymine
  modified_base 4: mod_base = OTHER; mod_base = m5c; note = sugar modification: 2'-O-methoxyethylribose; note = backbone modification: 5'-phosphorothioate
  modified_base 5: mod_base = OTHER; note = backbone modification: 5'-phosphorothioate; note = thymine; note = sugar modification: 2'-O-methoxyethylribose
  modified_base 6: mod_base = OTHER; note = backbone modification: 5'-phosphorothioate; note = thymine; note = sugar modification: 2'-O-methoxyethylribose
  modified_base 7: mod_base = OTHER; note = backbone modification: 5'-phosphorothioate; note = sugar modification: 2'-O-methoxyethylribose
  modified_base 8: mod_base = OTHER; note = sugar modification: 2'-O-methoxyethylribose; note = thymine; note = backbone modification: 5'-phosphorothioate
  modified_base 9: mod_base = OTHER; note = sugar modification: 2'-O-methoxyethylribose; note = backbone modification: 5'-phosphorothioate
  modified_base 10: mod_base = OTHER; mod_base = m5c; note = backbone modification: 5'-phosphorothioate; note = sugar modification: 2'-O-methoxyethylribose
  modified_base 11: mod_base = OTHER; note = backbone modification: 5'-phosphorothioate; note = thymine; note = sugar modification: 2'-O-methoxyethylribose
  modified_base 12: mod_base = OTHER; note = thymine; note = backbone modification: 5'-phosphorothioate; note = sugar modification: 2'-O-methoxyethylribose
  modified_base 13: mod_base = OTHER; mod_base = m5c; note = backbone modification: 5'-phosphorothioate; note = sugar modification: 2'-O-methoxyethylribose
  modified_base 14: mod_base = OTHER; note = sugar modification: 2'-O-methoxyethylribose; note = backbone modification: 5'-phosphorothioate
  modified_base 15: mod_base = OTHER; note = backbone modification: 5'-phosphorothioate; note = thymine; note = sugar modification: lna
  modified_base 16: mod_base = OTHER; mod_base = m5c; note = sugar modification: lna; note = backbone modification: 5'-phosphorothioate
  modified_base 17: mod_base = OTHER; mod_base = m5c; note = sugar modification: lna
gttcttgtacttcatcc

SEQ ID NO: 634 - RNA, 17 nt, synthetic construct
  source 1..17: mol_type = other RNA; note = Antisense oligonucleotide
  modified_base 1: mod_base = OTHER; note = sugar modification: lna; note = backbone modification: 5'-phosphorothioate; note = thymine
  modified_base 2: mod_base = OTHER; note = backbone modification: 5'-phosphorothioate; note = sugar modification: lna
  modified_base 3: mod_base = OTHER; note = sugar modification: lna; note = thymine; note = backbone modification: 5'-phosphorothioate
  modified_base 4: mod_base = OTHER; note = thymine; note = sugar modification: 2'-O-methoxyethylribose; note = backbone modification: 5'-phosphorothioate
  modified_base 5: mod_base = m5c; mod_base = OTHER; note = sugar modification: 2'-O-methoxyethylribose; note = backbone modification: 5'-phosphorothioate
  modified_base 6: mod_base = OTHER; note = backbone modification: 5'-phosphorothioate; note = sugar modification: 2'-O-methoxyethylribose; note = thymine
  modified_base 7: mod_base = OTHER; note = thymine; note = sugar modification: 2'-O-methoxyethylribose; note = backbone modification: 5'-phosphorothioate
  modified_base 8: mod_base = OTHER; note = sugar modification: 2'-O-methoxyethylribose; note = backbone modification: 5'-phosphorothioate
  modified_base 9: mod_base = OTHER; note = backbone modification: 5'-phosphorothioate; note = sugar modification: 2'-O-methoxyethylribose; note = thymine
  modified_base 10: mod_base = OTHER; note = sugar modification: 2'-O-methoxyethylribose; note = backbone modification: 5'-phosphorothioate
  modified_base 11: mod_base = OTHER; mod_base = m5c; note = sugar modification: 2'-O-methoxyethylribose; note = backbone modification: 5'-phosphorothioate
  modified_base 12: mod_base = OTHER; note = backbone modification: 5'-phosphorothioate; note = thymine; note = sugar modification: 2'-O-methoxyethylribose
  modified_base 13: mod_base = OTHER; note = thymine; note = sugar modification: 2'-O-methoxyethylribose; note = backbone modification: 5'-phosphorothioate
  modified_base 14: mod_base = OTHER; mod_base = m5c; note = sugar modification: 2'-O-methoxyethylribose; note = backbone modification: 5'-phosphorothioate
  modified_base 15: mod_base = OTHER; note = backbone modification: 5'-phosphorothioate; note = sugar modification: lna
  modified_base 16: mod_base = OTHER; note = sugar modification: lna; note = backbone modification: 5'-phosphorothioate; note = thymine
  modified_base 17: mod_base = OTHER; mod_base = m5c; note = sugar modification: lna
tgttcttgtacttcatc

SEQ ID NO: 635 - RNA, 17 nt, synthetic construct
  source 1..17: mol_type = other RNA; note = Antisense oligonucleotide
  modified_base 1: mod_base = OTHER; note = backbone modification: 5'-phosphorothioate; note = sugar modification: lna
  modified_base 2: mod_base = OTHER; note = thymine; note = backbone modification: 5'-phosphorothioate; note = sugar modification: lna
  modified_base 3: mod_base = OTHER; note = backbone modification: 5'-phosphorothioate; note = sugar modification: lna
  modified_base 4: mod_base = OTHER; note = backbone modification: 5'-phosphorothioate; note = thymine; note = sugar modification: 2'-O-methoxyethylribose
  modified_base 5: mod_base = OTHER; note = sugar modification: 2'-O-methoxyethylribose; note = thymine; note = backbone modification: 5'-phosphorothioate
  modified_base 6: mod_base = m5c; mod_base = OTHER; note = sugar modification: 2'-O-methoxyethylribose; note = backbone modification: 5'-phosphorothioate
  modified_base 7: mod_base = OTHER; note = backbone modification: 5'-phosphorothioate; note = thymine; note = sugar modification: 2'-O-methoxyethylribose
  modified_base 8: mod_base = OTHER; note = thymine; note = backbone modification: 5'-phosphorothioate; note = sugar modification: 2'-O-methoxyethylribose
  modified_base 9: mod_base = OTHER; note = backbone modification: 5'-phosphorothioate; note = sugar modification: 2'-O-methoxyethylribose
  modified_base 10: mod_base = OTHER; note = sugar modification: 2'-O-methoxyethylribose; note = thymine; note = backbone modification: 5'-phosphorothioate
  modified_base 11: mod_base = OTHER; note = sugar modification: 2'-O-methoxyethylribose; note = backbone modification: 5'-phosphorothioate
  modified_base 12: mod_base = m5c; mod_base = OTHER; note = backbone modification: 5'-phosphorothioate; note = sugar modification: 2'-O-methoxyethylribose
  modified_base 13: mod_base = OTHER; note = backbone modification: 5'-phosphorothioate; note = thymine; note = sugar modification: 2'-O-methoxyethylribose
  modified_base 14: mod_base = OTHER; note = backbone modification: 5'-phosphorothioate; note = sugar modification: 2'-O-methoxyethylribose; note = thymine
  modified_base 15: mod_base = m5c; mod_base = OTHER; note = sugar modification: lna; note = backbone modification: 5'-phosphorothioate
  modified_base 16: mod_base = OTHER; note = backbone modification: 5'-phosphorothioate; note = sugar modification: lna
  modified_base 17: mod_base = OTHER; note = sugar modification: lna; note = thymine
gtgttcttgtacttcat

SEQ ID NO: 636 - RNA, 17 nt, synthetic construct
  source 1..17: mol_type = other RNA; note = Antisense oligonucleotide
  modified_base 1: mod_base = OTHER; note = sugar modification: lna; note = backbone modification: 5'-phosphorothioate
  modified_base 2: mod_base = OTHER; note = backbone modification: 5'-phosphorothioate; note = sugar modification: lna
  modified_base 3: mod_base = OTHER; note = thymine; note = backbone modification: 5'-phosphorothioate; note = sugar modification: lna
  modified_base 4: mod_base = OTHER; note = backbone modification: 5'-phosphorothioate; note = sugar modification: 2'-O-methoxyethylribose
  modified_base 5: mod_base = OTHER; note = thymine; note = backbone modification: 5'-phosphorothioate; note = sugar modification: 2'-O-methoxyethylribose
  modified_base 6: mod_base = OTHER; note = backbone modification: 5'-phosphorothioate; note = thymine; note = sugar modification: 2'-O-methoxyethylribose
  modified_base 7: mod_base = OTHER; mod_base = m5c; note = sugar modification: 2'-O-methoxyethylribose; note = backbone modification: 5'-phosphorothioate
  modified_base 8: mod_base = OTHER; note = backbone modification: 5'-phosphorothioate; note = sugar modification: 2'-O-methoxyethylribose; note = thymine
  modified_base 9: mod_base = OTHER; note = backbone modification: 5'-phosphorothioate; note = sugar modification: 2'-O-methoxyethylribose; note = thymine
  modified_base 10: mod_base = OTHER; note = sugar modification: 2'-O-methoxyethylribose; note = backbone modification: 5'-phosphorothioate
  modified_base 11: mod_base = OTHER; note = backbone modification: 5'-phosphorothioate; note = sugar modification: 2'-O-methoxyethylribose; note = thymine
  modified_base 12: mod_base = OTHER; note = sugar modification: 2'-O-methoxyethylribose; note = backbone modification: 5'-phosphorothioate
  modified_base 13: mod_base = m5c; mod_base = OTHER; note = sugar modification: 2'-O-methoxyethylribose; note = backbone modification: 5'-phosphorothioate
  modified_base 14: mod_base = OTHER; note = thymine; note = sugar modification: 2'-O-methoxyethylribose; note = backbone modification: 5'-phosphorothioate
  modified_base 15: mod_base = OTHER; note = backbone modification: 5'-phosphorothioate; note = sugar modification: lna; note = thymine
  modified_base 16: mod_base = m5c; mod_base = OTHER; note = backbone modification: 5'-phosphorothioate; note = sugar modification: lna
  modified_base 17: mod_base = OTHER; note = sugar modification: lna
ggtgttcttgtacttca

SEQ ID NO: 637 - RNA, 17 nt, synthetic construct
  source 1..17: mol_type = other RNA; note = Antisense oligonucleotide
  modified_base 1: mod_base = OTHER; note = sugar modification: lna; note = backbone modification: 5'-phosphorothioate
  modified_base 2: mod_base = OTHER; note = backbone modification: 5'-phosphorothioate; note = sugar modification: lna
  modified_base 3: mod_base = OTHER; note = backbone modification: 5'-phosphorothioate; note = sugar modification: lna
  modified_base 4: mod_base = OTHER; note = sugar modification: 2'-O-methoxyethylribose; note = backbone modification: 5'-phosphorothioate; note = thymine
  modified_base 5: mod_base = OTHER; note = sugar modification: 2'-O-methoxyethylribose; note = backbone modification: 5'-phosphorothioate
  modified_base 6: mod_base = OTHER; note = thymine; note = sugar modification: 2'-O-methoxyethylribose; note = backbone modification: 5'-phosphorothioate
  modified_base 7: mod_base = OTHER; note = sugar modification: 2'-O-methoxyethylribose; note = backbone modification: 5'-phosphorothioate; note = thymine
  modified_base 8: mod_base = m5c; mod_base = OTHER; note = backbone modification: 5'-phosphorothioate; note = sugar modification: 2'-O-methoxyethylribose
  modified_base 9: mod_base = OTHER; note = sugar modification: 2'-O-methoxyethylribose; note = thymine; note = backbone modification: 5'-phosphorothioate
  modified_base 10: mod_base = OTHER; note = backbone modification: 5'-phosphorothioate; note = sugar modification: 2'-O-methoxyethylribose; note = thymine
  modified_base 11: mod_base = OTHER; note = backbone modification: 5'-phosphorothioate; note = sugar modification: 2'-O-methoxyethylribose
  modified_base 12: mod_base = OTHER; note = sugar modification: 2'-O-methoxyethylribose; note = backbone modification: 5'-phosphorothioate; note = thymine
  modified_base 13: mod_base = OTHER; note = backbone modification: 5'-phosphorothioate; note = sugar modification: 2'-O-methoxyethylribose
  modified_base 14: mod_base = m5c; mod_base = OTHER; note = backbone modification: 5'-phosphorothioate; note = sugar modification: 2'-O-methoxyethylribose
  modified_base 15: mod_base = OTHER; note = thymine; note = sugar modification: lna; note = backbone modification: 5'-phosphorothioate
  modified_base 16: mod_base = OTHER; note = sugar modification: lna; note = backbone modification: 5'-phosphorothioate; note = thymine
  modified_base 17: mod_base = OTHER; mod_base = m5c; note = sugar modification: lna
aggtgttcttgtacttc

SEQ ID NO: 638 - RNA, 17 nt, synthetic construct
  source 1..17: mol_type = other RNA; note = Antisense oligonucleotide
  modified_base 1: mod_base = OTHER; note = backbone modification: 5'-phosphorothioate; note = sugar modification: lna
  modified_base 2: mod_base = OTHER; note = backbone modification: 5'-phosphorothioate; note = sugar modification: lna
  modified_base 3: mod_base = OTHER; note = backbone modification: 5'-phosphorothioate; note = sugar modification: lna
  modified_base 4: mod_base = OTHER; note = backbone modification: 5'-phosphorothioate; note = sugar modification: 2'-O-methoxyethylribose
  modified_base 5: mod_base = OTHER; note = thymine; note = backbone modification: 5'-phosphorothioate; note = sugar modification: 2'-O-methoxyethylribose
  modified_base 6: mod_base = OTHER; note = backbone modification: 5'-phosphorothioate; note = sugar modification: 2'-O-methoxyethylribose
  modified_base 7: mod_base = OTHER; note = backbone modification: 5'-phosphorothioate; note = thymine; note = sugar modification: 2'-O-methoxyethylribose
  modified_base 8: mod_base = OTHER; note = backbone modification: 5'-phosphorothioate; note = sugar modification: 2'-O-methoxyethylribose; note = thymine
  modified_base 9: mod_base = m5c; mod_base = OTHER; note = sugar modification: 2'-O-methoxyethylribose; note = backbone modification: 5'-phosphorothioate
  modified_base 10: mod_base = OTHER; note = thymine; note = backbone modification: 5'-phosphorothioate; note = sugar modification: 2'-O-methoxyethylribose
  modified_base 11: mod_base = OTHER; note = thymine; note = backbone modification: 5'-phosphorothioate; note = sugar modification: 2'-O-methoxyethylribose
  modified_base 12: mod_base = OTHER; note = backbone modification: 5'-phosphorothioate; note = sugar modification: 2'-O-methoxyethylribose
  modified_base 13: mod_base = OTHER; note = backbone modification: 5'-phosphorothioate; note = thymine; note = sugar modification: 2'-O-methoxyethylribose
  modified_base 14: mod_base = OTHER; note = sugar modification: 2'-O-methoxyethylribose; note = backbone modification: 5'-phosphorothioate
  modified_base 15: mod_base = m5c; mod_base = OTHER; note = sugar modification: lna; note = backbone modification: 5'-phosphorothioate
  modified_base 16: mod_base = OTHER; note = backbone modification: 5'-phosphorothioate; note = thymine; note = sugar modification: lna
  modified_base 17: mod_base = OTHER; note = thymine; note = sugar modification: lna
aaggtgttcttgtactt

SEQ ID NO: 639 - RNA, 19 nt, synthetic construct
  source 1..19: mol_type = other RNA; note = Antisense oligonucleotide
  modified_base 1: mod_base = OTHER; note = backbone modification: 5'-phosphorothioate; note = sugar modification: 2'-O-methoxyethylribose
  modified_base 2: mod_base = OTHER; note = thymine; note = backbone modification: 5'-phosphorothioate; note = sugar modification: 2'-O-methoxyethylribose
  modified_base 3: mod_base = OTHER; note = thymine; note = backbone modification: 5'-phosphorothioate; note = sugar modification: 2'-O-methoxyethylribose
  modified_base 4: mod_base = m5c; mod_base = OTHER; note = backbone modification: 5'-phosphorothioate; note = sugar modification: 2'-O-methoxyethylribose
  modified_base 5: mod_base = OTHER; note = sugar modification: 2'-O-methoxyethylribose; note = thymine; note = backbone modification: 5'-phosphorothioate
  modified_base 6: mod_base = OTHER; note = backbone modification: 5'-phosphorothioate; note = sugar modification: 2'-O-methoxyethylribose; note = thymine
  modified_base 7: mod_base = OTHER; note = backbone modification: 5'-phosphorothioate; note = sugar modification: 2'-O-methoxyethylribose
  modified_base 8: mod_base = OTHER; note = backbone modification: 5'-phosphorothioate; note = sugar modification: 2'-O-methoxyethylribose; note = thymine
  modified_base 9: mod_base = OTHER; note = backbone modification: 5'-phosphorothioate; note = sugar modification: 2'-O-methoxyethylribose
  modified_base 10: mod_base = m5c; mod_base = OTHER; note = sugar modification: 2'-O-methoxyethylribose; note = backbone modification: 5'-phosphorothioate
  modified_base 11: mod_base = OTHER; note = thymine; note = backbone modification: 5'-phosphorothioate; note = sugar modification: 2'-O-methoxyethylribose
  modified_base 12: mod_base = OTHER; note = sugar modification: 2'-O-methoxyethylribose; note = backbone modification: 5'-phosphorothioate; note = thymine
  modified_base 13: mod_base = m5c; mod_base = OTHER; note = backbone modification: 5'-phosphorothioate; note = sugar modification: 2'-O-methoxyethylribose
  modified_base 14: mod_base = OTHER; note = backbone modification: 5'-phosphorothioate; note = sugar modification: 2'-O-methoxyethylribose
  modified_base 15: mod_base = OTHER; note = sugar modification: 2'-O-methoxyethylribose; note = thymine; note = backbone modification: 5'-phosphorothioate
  modified_base 16: mod_base = m5c; mod_base = OTHER; note = backbone modification: 5'-phosphorothioate; note = sugar modification: 2'-O-methoxyethylribose
  modified_base 17: mod_base = m5c; mod_base = OTHER; note = sugar modification: 2'-O-methoxyethylribose; note = backbone modification: 5'-phosphorothioate
  modified_base 18: mod_base = OTHER; mod_base = m5c; note = sugar modification: 2'-O-methoxyethylribose; note = backbone modification: 5'-phosphorothioate
  modified_base 19: mod_base = OTHER; note = sugar modification: 2'-O-methoxyethylribose
gttcttgtacttcatccca

SEQ ID NO: 640 - RNA, 19 nt, synthetic construct
  source 1..19: mol_type = other RNA; note = Antisense oligonucleotide
  modified_base 1: mod_base = OTHER; note = sugar modification: 2'-O-methoxyethylribose; note = backbone modification: 5'-phosphorothioate; note = thymine
  modified_base 2: mod_base = OTHER; note = backbone modification: 5'-phosphorothioate; note = sugar modification: 2'-O-methoxyethylribose
  modified_base 3: mod_base = OTHER; note = backbone modification: 5'-phosphorothioate; note = sugar modification: 2'-O-methoxyethylribose; note = thymine
  modified_base 4: mod_base = OTHER; note = backbone modification: 5'-phosphorothioate; note = thymine; note = sugar modification: 2'-O-methoxyethylribose
  modified_base 5: mod_base = OTHER; mod_base = m5c; note = sugar modification: 2'-O-methoxyethylribose; note = backbone modification: 5'-phosphorothioate
  modified_base 6: mod_base = OTHER; note = backbone modification: 5'-phosphorothioate; note = thymine; note = sugar modification: 2'-O-methoxyethylribose
  modified_base 7: mod_base = OTHER; note = backbone modification: 5'-phosphorothioate; note = sugar modification: 2'-O-methoxyethylribose; note = thymine
  modified_base 8: mod_base = OTHER; note = sugar modification: 2'-O-methoxyethylribose; note = backbone modification: 5'-phosphorothioate
  modified_base 9: mod_base = OTHER; note = thymine; note = sugar modification: 2'-O-methoxyethylribose; note = backbone modification: 5'-phosphorothioate
  modified_base 10: mod_base = OTHER; note = backbone modification: 5'-phosphorothioate; note = sugar modification: 2'-O-methoxyethylribose
  modified_base 11: mod_base = OTHER; mod_base = m5c; note = backbone modification: 5'-phosphorothioate; note = sugar modification: 2'-O-methoxyethylribose
  modified_base 12: mod_base = OTHER; note = thymine; note = sugar modification: 2'-O-methoxyethylribose; note = backbone modification: 5'-phosphorothioate
  modified_base 13: mod_base = OTHER; note = sugar modification: 2'-O-methoxyethylribose; note = thymine; note = backbone modification: 5'-phosphorothioate
  modified_base 14: mod_base = OTHER; mod_base = m5c; note = backbone modification: 5'-phosphorothioate; note = sugar modification: 2'-O-methoxyethylribose
  modified_base 15: mod_base = OTHER; note = sugar modification: 2'-O-methoxyethylribose; note = backbone modification: 5'-phosphorothioate
  modified_base 16: mod_base = OTHER; note = backbone modification: 5'-phosphorothioate; note = sugar modification: 2'-O-methoxyethylribose; note = thymine
  modified_base 17: mod_base = m5c; mod_base = OTHER; note = backbone modification: 5'-phosphorothioate; note = sugar modification: 2'-O-methoxyethylribose
  modified_base 18: mod_base = m5c; mod_base = OTHER; note = sugar modification: 2'-O-methoxyethylribose; note = backbone modification: 5'-phosphorothioate
  modified_base 19: mod_base = OTHER; mod_base = m5c; note = sugar modification: 2'-O-methoxyethylribose
tgttcttgtacttcatccc

SEQ ID NO: 641 - RNA, 19 nt, synthetic construct
  source 1..19: mol_type = other RNA; note = Antisense oligonucleotide
  modified_base 1: mod_base = OTHER; note = sugar modification: 2'-O-methoxyethylribose; note = backbone modification: 5'-phosphorothioate
  modified_base 2: mod_base = OTHER; note = backbone modification: 5'-phosphorothioate; note = sugar modification: 2'-O-methoxyethylribose; note = thymine
  modified_base 3: mod_base = OTHER; note = backbone modification: 5'-phosphorothioate; note = sugar modification: 2'-O-methoxyethylribose
  modified_base 4: mod_base = OTHER; note = backbone modification: 5'-phosphorothioate; note = sugar modification: 2'-O-methoxyethylribose; note = thymine
  modified_base 5: mod_base = OTHER; note = sugar modification: 2'-O-methoxyethylribose; note = backbone modification: 5'-phosphorothioate; note = thymine
  modified_base 6: mod_base = OTHER; mod_base = m5c; note = sugar modification: 2'-O-methoxyethylribose; note = backbone modification: 5'-phosphorothioate
  modified_base 7: mod_base = OTHER; note = sugar modification: 2'-O-methoxyethylribose; note = thymine; note = backbone modification: 5'-phosphorothioate
  modified_base 8: mod_base = OTHER; note = backbone modification: 5'-phosphorothioate; note = thymine; note = sugar modification: 2'-O-methoxyethylribose
  modified_base 9: mod_base = OTHER; note = backbone modification: 5'-phosphorothioate; note = sugar modification: 2'-O-methoxyethylribose
  modified_base 10: mod_base = OTHER; note = thymine; note = backbone modification: 5'-phosphorothioate; note = sugar modification: 2'-O-methoxyethylribose
  modified_base 11: mod_base = OTHER; note = backbone modification: 5'-phosphorothioate; note = sugar modification: 2'-O-methoxyethylribose
  modified_base 12: mod_base = m5c; mod_base = OTHER; note = sugar modification: 2'-O-methoxyethylribose; note = backbone modification: 5'-phosphorothioate
  modified_base 13: mod_base = OTHER; note = sugar modification: 2'-O-methoxyethylribose; note = thymine; note = backbone modification: 5'-phosphorothioate
  modified_base 14: mod_base = OTHER; note = sugar modification: 2'-O-methoxyethylribose; note = thymine; note = backbone modification: 5'-phosphorothioate
  modified_base 15: mod_base = OTHER; mod_base = m5c; note = backbone modification: 5'-phosphorothioate; note = sugar modification: 2'-O-methoxyethylribose
  modified_base 16: mod_base = OTHER; note = sugar modification: 2'-O-methoxyethylribose; note = backbone modification: 5'-phosphorothioate
  modified_base 17: mod_base = OTHER; note = thymine; note = sugar modification: 2'-O-methoxyethylribose; note = backbone modification: 5'-phosphorothioate
  modified_base 18: mod_base = m5c; mod_base = OTHER; note = sugar modification: 2'-O-methoxyethylribose; note = backbone modification: 5'-phosphorothioate
  modified_base 19: mod_base = m5c; mod_base = OTHER; note = sugar modification: 2'-O-methoxyethylribose
gtgttcttgtacttcatcc

SEQ ID NO: 642 - RNA, 19 nt, synthetic construct
  source 1..19: mol_type = other RNA; note = Antisense oligonucleotide
  modified_base 1: mod_base = OTHER; note = backbone modification: 5'-phosphorothioate; note = sugar modification: 2'-O-methoxyethylribose
  modified_base 2: mod_base = OTHER; note = backbone modification: 5'-phosphorothioate; note = sugar modification: 2'-O-methoxyethylribose
  modified_base 3: mod_base = OTHER; note = backbone modification: 5'-phosphorothioate; note = sugar modification: 2'-O-methoxyethylribose; note = thymine
  modified_base 4: mod_base = OTHER; note = sugar modification: 2'-O-methoxyethylribose; note = backbone modification: 5'-phosphorothioate
  modified_base 5: mod_base = OTHER; note = backbone modification: 5'-phosphorothioate; note = thymine; note = sugar modification: 2'-O-methoxyethylribose
  modified_base 6: mod_base = OTHER; note = backbone modification: 5'-phosphorothioate; note = thymine; note = sugar modification: 2'-O-methoxyethylribose
  modified_base 7: mod_base = m5c; mod_base = OTHER; note = backbone modification: 5'-phosphorothioate; note = sugar modification: 2'-O-methoxyethylribose
  modified_base 8: mod_base = OTHER; note = backbone modification: 5'-phosphorothioate; note = sugar modification: 2'-O-methoxyethylribose; note = thymine
  modified_base 9: mod_base = OTHER; note = sugar modification: 2'-O-methoxyethylribose; note = backbone modification: 5'-phosphorothioate; note = thymine
  modified_base 10: mod_base = OTHER; note = sugar modification: 2'-O-methoxyethylribose; note = backbone modification: 5'-phosphorothioate
  modified_base 11: mod_base = OTHER; note = thymine; note = backbone modification: 5'-phosphorothioate; note = sugar modification: 2'-O-methoxyethylribose
  modified_base 12: mod_base = OTHER; note = sugar modification: 2'-O-methoxyethylribose; note = backbone modification: 5'-phosphorothioate
  modified_base 13: mod_base = OTHER; mod_base = m5c; note = sugar modification: 2'-O-methoxyethylribose; note = backbone modification: 5'-phosphorothioate
  modified_base 14: mod_base = OTHER; note = thymine; note = sugar modification: 2'-O-methoxyethylribose; note = backbone modification: 5'-phosphorothioate
  modified_base 15: mod_base = OTHER; note = sugar modification: 2'-O-methoxyethylribose; note = backbone modification: 5'-phosphorothioate; note = thymine
  modified_base 16: mod_base = m5c; mod_base = OTHER; note = sugar modification: 2'-O-methoxyethylribose; note = backbone modification: 5'-phosphorothioate
  modified_base 17: mod_base = OTHER; note = backbone modification: 5'-phosphorothioate; note = sugar modification: 2'-O-methoxyethylribose
  modified_base 18: mod_base = OTHER; note = thymine; note = sugar modification: 2'-O-methoxyethylribose; note = backbone modification: 5'-phosphorothioate
  modified_base 19: mod_base = OTHER; mod_base = m5c; note = sugar modification: 2'-O-methoxyethylribose
ggtgttcttgtacttcatc

SEQ ID NO: 643 - RNA, 19 nt, synthetic construct
  source 1..19: mol_type = other RNA; note = Antisense oligonucleotide
  modified_base 1: mod_base = OTHER; note = sugar modification: 2'-O-methoxyethylribose; note = backbone modification: 5'-phosphorothioate
  modified_base 2: mod_base = OTHER; note = sugar modification: 2'-O-methoxyethylribose; note = backbone modification: 5'-phosphorothioate
  modified_base 3: mod_base = OTHER; note = backbone modification: 5'-phosphorothioate; note = sugar modification: 2'-O-methoxyethylribose
  modified_base 4: mod_base = OTHER; note = backbone modification: 5'-phosphorothioate; note = sugar modification: 2'-O-methoxyethylribose; note = thymine
  modified_base 5: mod_base = OTHER; note = sugar modification: 2'-O-methoxyethylribose; note = backbone modification: 5'-phosphorothioate
  modified_base 6: mod_base = OTHER; note = thymine; note = backbone modification: 5'-phosphorothioate; note = sugar modification: 2'-O-methoxyethylribose
  modified_base 7: mod_base = OTHER; note = sugar modification: 2'-O-methoxyethylribose; note = backbone modification: 5'-phosphorothioate; note = thymine
  modified_base 8: mod_base = OTHER; mod_base = m5c; note = sugar modification: 2'-O-methoxyethylribose; note = backbone modification: 5'-phosphorothioate
  modified_base 9: mod_base = OTHER; note = backbone modification: 5'-phosphorothioate; note = thymine; note = sugar modification: 2'-O-methoxyethylribose
  modified_base 10: mod_base = OTHER; note = sugar modification: 2'-O-methoxyethylribose; note = backbone modification: 5'-phosphorothioate; note = thymine
  modified_base 11: mod_base = OTHER; note = sugar modification: 2'-O-methoxyethylribose; note = backbone modification: 5'-phosphorothioate
  modified_base 12: mod_base = OTHER; note = thymine; note = backbone modification: 5'-phosphorothioate; note = sugar modification: 2'-O-methoxyethylribose
  modified_base 13: mod_base = OTHER; note = backbone modification: 5'-phosphorothioate; note = sugar modification: 2'-O-methoxyethylribose
  modified_base 14: mod_base = OTHER; mod_base = m5c; note = backbone modification: 5'-phosphorothioate; note = sugar modification: 2'-O-methoxyethylribose
  modified_base 15: mod_base = OTHER; note = thymine; note = sugar modification: 2'-O-methoxyethylribose; note = backbone modification: 5'-phosphorothioate
  modified_base 16: mod_base = OTHER; note = sugar modification: 2'-O-methoxyethylribose; note = backbone modification: 5'-phosphorothioate; note = thymine
  modified_base 17: mod_base = OTHER; mod_base = m5c; note = sugar modification: 2'-O-methoxyethylribose; note = backbone modification: 5'-phosphorothioate
  modified_base 18: mod_base = OTHER; note = sugar modification: 2'-O-methoxyethylribose; note = backbone modification: 5'-phosphorothioate
  modified_base 19: mod_base = OTHER; note = thymine; note = sugar modification: 2'-O-methoxyethylribose
aggtgttcttgtacttcat

SEQ ID NO: 644 - RNA, 19 nt, synthetic construct
  source 1..19: mol_type = other RNA; note = Antisense oligonucleotide
  modified_base 1: mod_base = OTHER; note = sugar modification: 2'-O-methoxyethylribose; note = backbone modification: 5'-phosphorothioate
  modified_base 2: mod_base = OTHER; note = sugar modification: 2'-O-methoxyethylribose; note = backbone modification: 5'-phosphorothioate
  modified_base 3: mod_base = OTHER; note = backbone modification: 5'-phosphorothioate; note = sugar modification: 2'-O-methoxyethylribose
  modified_base 4: mod_base = OTHER; note = sugar modification: 2'-O-methoxyethylribose; note = backbone modification: 5'-phosphorothioate
  modified_base 5: mod_base = OTHER; note = sugar modification: 2'-O-methoxyethylribose; note = thymine; note = backbone modification: 5'-phosphorothioate
  modified_base 6: mod_base = OTHER; note = sugar modification: 2'-O-methoxyethylribose; note = backbone modification: 5'-phosphorothioate
  modified_base 7: mod_base = OTHER; note = backbone modification: 5'-phosphorothioate; note = sugar modification: 2'-O-methoxyethylribose; note = thymine
  modified_base 8: mod_base = OTHER; note = backbone modification: 5'-phosphorothioate; note = sugar modification: 2'-O-methoxyethylribose; note = thymine
  modified_base 9: mod_base = m5c; mod_base = OTHER; note = sugar modification: 2'-O-methoxyethylribose; note = backbone modification: 5'-phosphorothioate
  modified_base 10: mod_base = OTHER; note = backbone modification: 5'-phosphorothioate; note = sugar modification: 2'-O-methoxyethylribose; note = thymine
  modified_base 11: mod_base = OTHER; note = thymine; note = backbone modification: 5'-phosphorothioate; note = sugar modification: 2'-O-methoxyethylribose
  modified_base 12: mod_base = OTHER; note = backbone modification: 5'-phosphorothioate; note = sugar modification: 2'-O-methoxyethylribose
  modified_base 13: mod_base = OTHER; note = thymine; note = sugar modification: 2'-O-methoxyethylribose; note = backbone modification: 5'-phosphorothioate
  modified_base 14: mod_base = OTHER; note = sugar modification: 2'-O-methoxyethylribose; note = backbone modification: 5'-phosphorothioate
  modified_base 15: mod_base = OTHER; mod_base = m5c; note = sugar modification: 2'-O-methoxyethylribose; note = backbone modification: 5'-phosphorothioate
  modified_base 16: mod_base = OTHER; note = thymine; note = sugar modification: 2'-O-methoxyethylribose; note = backbone modification: 5'-phosphorothioate
  modified_base 17: mod_base = OTHER; note = backbone modification: 5'-phosphorothioate; note = sugar modification: 2'-O-methoxyethylribose; note = thymine
  modified_base 18: mod_base = OTHER; mod_base = m5c; note = sugar modification: 2'-O-methoxyethylribose; note = backbone modification: 5'-phosphorothioate
  modified_base 19: mod_base = OTHER; note = sugar modification: 2'-O-methoxyethylribose
aaggtgttcttgtacttca

SEQ ID NO: 645 - RNA, 19 nt, synthetic construct
  source 1..19: mol_type = other RNA; note = Antisense oligonucleotide
  modified_base 1: mod_base = OTHER; note = sugar modification: lna; note = backbone modification: 5'-phosphorothioate
  modified_base 2: mod_base = OTHER; note = sugar modification: lna; note = backbone modification: 5'-phosphorothioate; note = thymine
  modified_base 3: mod_base = OTHER; note = thymine; note = sugar modification: lna; note = backbone modification: 5'-phosphorothioate
  modified_base 4: mod_base = OTHER; mod_base = m5c; note = sugar modification: 2'-O-methoxyethylribose; note = backbone modification: 5'-phosphorothioate
  modified_base 5: mod_base = OTHER; note = backbone modification: 5'-phosphorothioate; note = sugar modification: 2'-O-methoxyethylribose; note = thymine
  modified_base 6: mod_base = OTHER; note = backbone modification: 5'-phosphorothioate; note = thymine; note = sugar modification: 2'-O-methoxyethylribose
  modified_base 7: mod_base = OTHER; note = backbone modification: 5'-phosphorothioate; note = sugar modification: 2'-O-methoxyethylribose
  modified_base 8: mod_base = OTHER; note = thymine; note = backbone modification: 5'-phosphorothioate; note = sugar modification: 2'-O-methoxyethylribose
  modified_base 9: mod_base = OTHER; note = sugar modification: 2'-O-methoxyethylribose; note = backbone modification: 5'-phosphorothioate
  modified_base 10: mod_base = OTHER; mod_base = m5c; note = sugar modification: 2'-O-methoxyethylribose; note = backbone modification: 5'-phosphorothioate
  modified_base 11: mod_base = OTHER; note = sugar modification: 2'-O-methoxyethylribose; note = thymine; note = backbone modification: 5'-phosphorothioate
  modified_base 12: mod_base = OTHER; note = backbone modification: 5'-phosphorothioate; note = thymine; note = sugar modification: 2'-O-methoxyethylribose
  modified_base 13: mod_base = OTHER; mod_base = m5c; note = sugar modification: 2'-O-methoxyethylribose; note = backbone modification: 5'-phosphorothioate
  modified_base 14: mod_base = OTHER; note = sugar modification: 2'-O-methoxyethylribose; note = backbone modification: 5'-phosphorothioate
  modified_base 15: mod_base = OTHER; note = thymine; note = sugar modification: 2'-O-methoxyethylribose; note = backbone modification: 5'-phosphorothioate
  modified_base 16: mod_base = m5c; mod_base = OTHER; note = backbone modification: 5'-phosphorothioate; note = sugar modification: 2'-O-methoxyethylribose
  modified_base 17: mod_base = OTHER; mod_base = m5c; note = backbone modification: 5'-phosphorothioate; note = sugar modification: lna
  modified_base 18: mod_base = m5c; mod_base = OTHER; note = sugar modification: lna; note = backbone modification: 5'-phosphorothioate
  modified_base 19: mod_base = OTHER; note = sugar modification: lna
gttcttgtacttcatccca

SEQ ID NO: 646 - RNA, 19 nt, synthetic construct
  source 1..19: mol_type = other RNA; note = Antisense oligonucleotide
  modified_base 1: mod_base = OTHER; note = sugar modification: lna; note = thymine; note = backbone modification: 5'-phosphorothioate
  modified_base 2: mod_base = OTHER; note = sugar modification: lna; note = backbone modification: 5'-phosphorothioate
  modified_base 3: mod_base = OTHER; note = backbone modification: 5'-phosphorothioate; note = sugar modification: lna; note = thymine
  modified_base 4: mod_base = OTHER; note = backbone modification: 5'-phosphorothioate; note = thymine; note = sugar modification: 2'-O-methoxyethylribose
  modified_base 5: mod_base = OTHER; mod_base = m5c; note = backbone modification: 5'-phosphorothioate; note = sugar modification: 2'-O-methoxyethylribose
  modified_base 6: mod_base = OTHER; note = backbone modification: 5'-phosphorothioate; note = thymine; note = sugar modification: 2'-O-methoxyethylribose
  modified_base 7: mod_base = OTHER; note = backbone modification: 5'-phosphorothioate; note = sugar modification: 2'-O-methoxyethylribose; note = thymine
  modified_base 8: mod_base = OTHER; note = backbone modification: 5'-phosphorothioate; note = sugar modification: 2'-O-methoxyethylribose
  modified_base 9: mod_base = OTHER; note = sugar modification: 2'-O-methoxyethylribose; note = backbone modification: 5'-phosphorothioate; note = thymine
  modified_base 10: mod_base = OTHER; note = sugar modification: 2'-O-methoxyethylribose; note = backbone modification: 5'-phosphorothioate
  modified_base 11: mod_base = OTHER; mod_base = m5c; note = sugar modification: 2'-O-methoxyethylribose; note = backbone modification: 5'-phosphorothioate
  modified_base 12: mod_base = OTHER; note = backbone modification: 5'-phosphorothioate; note = sugar modification: 2'-O-methoxyethylribose; note = thymine
  modified_base 13: mod_base = OTHER; note = backbone modification: 5'-phosphorothioate; note = thymine; note = sugar modification: 2'-O-methoxyethylribose
  modified_base 14: mod_base = m5c; mod_base = OTHER; note = sugar modification: 2'-O-methoxyethylribose; note = backbone modification: 5'-phosphorothioate
  modified_base 15: mod_base = OTHER; note = sugar modification: 2'-O-methoxyethylribose; note = backbone modification: 5'-phosphorothioate
  modified_base 16: mod_base = OTHER; note = thymine; note = sugar modification: 2'-O-methoxyethylribose; note = backbone modification: 5'-phosphorothioate
  modified_base 17: mod_base = OTHER; mod_base = m5c; note = backbone modification: 5'-phosphorothioate; note = sugar modification: lna
  modified_base 18: mod_base = m5c; mod_base = OTHER; note = sugar modification: lna; note = backbone modification: 5'-phosphorothioate
  modified_base 19: mod_base = OTHER; mod_base = m5c; note = sugar modification: lna
tgttcttgtacttcatccc

SEQ ID NO: 647 - RNA, 19 nt, synthetic construct
  source 1..19: mol_type = other RNA; note = Antisense oligonucleotide
  modified_base 1: mod_base = OTHER; note = backbone modification: 5'-phosphorothioate; note = sugar modification: lna
  modified_base 2: mod_base = OTHER; note = thymine; note = backbone modification: 5'-phosphorothioate; note = sugar modification: lna
  modified_base 3: mod_base = OTHER; note = backbone modification: 5'-phosphorothioate; note = sugar modification: lna
  modified_base 4: mod_base = OTHER; note = backbone modification: 5'-phosphorothioate; note = sugar modification: 2'-O-methoxyethylribose; note = thymine
  modified_base 5: mod_base = OTHER; note = sugar modification: 2'-O-methoxyethylribose; note = backbone modification: 5'-phosphorothioate; note = thymine
  modified_base 6: mod_base = m5c; mod_base = OTHER; note = backbone modification: 5'-phosphorothioate; note = sugar modification: 2'-O-methoxyethylribose
  modified_base 7: mod_base = OTHER; note = backbone modification: 5'-phosphorothioate; note = sugar modification: 2'-O-methoxyethylribose; note = thymine
  modified_base 8: mod_base = OTHER; note = backbone modification: 5'-phosphorothioate; note = thymine; note = sugar modification: 2'-O-methoxyethylribose
  modified_base 9: mod_base = OTHER; note = backbone modification: 5'-phosphorothioate; note = sugar modification: 2'-O-methoxyethylribose
  modified_base 10: mod_base = OTHER; note = thymine; note = backbone modification: 5'-phosphorothioate; note = sugar modification: 2'-O-methoxyethylribose
  modified_base 11: mod_base = OTHER; note = sugar modification: 2'-O-methoxyethylribose; note = backbone modification: 5'-phosphorothioate
  modified_base 12: mod_base = m5c; mod_base = OTHER; note = sugar modification: 2'-O-methoxyethylribose; note = backbone modification: 5'-phosphorothioate
  modified_base 13: mod_base = OTHER; note = sugar modification: 2'-O-methoxyethylribose; note = backbone modification: 5'-phosphorothioate; note = thymine
  modified_base 14: mod_base = OTHER; note = sugar modification: 2'-O-methoxyethylribose; note = backbone modification: 5'-phosphorothioate; note = thymine
  modified_base 15: mod_base = m5c; mod_base = OTHER; note = sugar modification: 2'-O-methoxyethylribose; note = backbone modification: 5'-phosphorothioate
  modified_base 16: mod_base = OTHER; note = sugar modification: 2'-O-methoxyethylribose; note = backbone modification: 5'-phosphorothioate
  modified_base 17: mod_base = OTHER; note = thymine; note = backbone modification: 5'-phosphorothioate; note = sugar modification: lna
  modified_base 18: mod_base = OTHER; mod_base = m5c; note = sugar modification: lna; note = backbone modification: 5'-phosphorothioate
  modified_base 19: mod_base = OTHER; mod_base = m5c; note = sugar modification: lna
gtgttcttgtacttcatcc

SEQ ID NO: 648 - RNA, 19 nt, synthetic construct
  source 1..19: mol_type = other RNA; note = Antisense oligonucleotide
  modified_base 1: mod_base = OTHER; note = sugar modification: lna; note = backbone modification: 5'-phosphorothioate
  modified_base 2: mod_base = OTHER; note = backbone modification: 5'-phosphorothioate; note = sugar modification: lna
  modified_base 3: mod_base = OTHER; note = thymine; note = backbone modification: 5'-phosphorothioate; note = sugar modification: lna
  modified_base 4: mod_base = OTHER; note = sugar modification: 2'-O-methoxyethylribose; note = backbone modification: 5'-phosphorothioate
  modified_base 5: mod_base = OTHER; note = backbone modification: 5'-phosphorothioate; note = thymine; note = sugar modification: 2'-O-methoxyethylribose
  modified_base 6: mod_base = OTHER; note = backbone modification: 5'-phosphorothioate; note = thymine; note = sugar modification: 2'-O-methoxyethylribose
  modified_base 7: mod_base = m5c; mod_base = OTHER; note = backbone modification: 5'-phosphorothioate; note = sugar modification: 2'-O-methoxyethylribose
  modified_base 8: mod_base = OTHER; note = sugar modification: 2'-O-methoxyethylribose; note = thymine; note = backbone modification: 5'-phosphorothioate
  modified_base 9: mod_base = OTHER; note = thymine; note = backbone modification: 5'-phosphorothioate; note = sugar modification: 2'-O-methoxyethylribose
  modified_base 10: mod_base = OTHER; note = backbone modification: 5'-phosphorothioate; note = sugar modification: 2'-O-methoxyethylribose
  modified_base 11: mod_base = OTHER; note = backbone modification: 5'-phosphorothioate; note = thymine; note = sugar modification: 2'-O-methoxyethylribose
  modified_base 12: mod_base = OTHER; note = backbone modification: 5'-phosphorothioate; note = sugar modification: 2'-O-methoxyethylribose
  modified_base 13: mod_base = m5c; mod_base = OTHER; note = backbone modification: 5'-phosphorothioate; note = sugar modification: 2'-O-methoxyethylribose
  modified_base 14: mod_base = OTHER; note = backbone modification: 5'-phosphorothioate; note = thymine; note = sugar modification: 2'-O-methoxyethylribose
  modified_base 15: mod_base = OTHER; note = sugar modification: 2'-O-methoxyethylribose; note = thymine; note = backbone modification: 5'-phosphorothioate
  modified_base 16: mod_base = m5c; mod_base = OTHER; note = sugar modification: 2'-O-methoxyethylribose; note = backbone modification: 5'-phosphorothioate
  modified_base 17: mod_base = OTHER; note = sugar modification: lna; note = backbone modification: 5'-phosphorothioate
  modified_base 18: mod_base = OTHER; note = sugar modification: lna; note = thymine; note = backbone modification: 5'-phosphorothioate
  modified_base 19: mod_base = OTHER; mod_base = m5c; note = sugar modification: lna
ggtgttcttgtacttcatc

SEQ ID NO: 649 - RNA, 19 nt, synthetic construct
  source 1..19: mol_type = other RNA; note = Antisense oligonucleotide
  modified_base 1: mod_base = OTHER; note = backbone modification: 5'-phosphorothioate; note = sugar modification: lna
  modified_base 2: mod_base = OTHER; note = backbone modification: 5'-phosphorothioate; note = sugar modification: lna
  modified_base 3: mod_base = OTHER; note = sugar modification: lna; note = backbone modification: 5'-phosphorothioate
  modified_base 4: mod_base = OTHER; note = sugar modification: 2'-O-methoxyethylribose; note = backbone modification: 5'-phosphorothioate; note = thymine
  modified_base 5: mod_base = OTHER; note = sugar modification: 2'-O-methoxyethylribose; note = backbone modification: 5'-phosphorothioate
  modified_base 6: mod_base = OTHER; note = backbone modification: 5'-phosphorothioate; note = thymine; note = sugar modification: 2'-O-methoxyethylribose
  modified_base 7: mod_base = OTHER; note = backbone modification: 5'-phosphorothioate; note = thymine; note = sugar modification: 2'-O-methoxyethylribose
  modified_base 8: mod_base = OTHER; mod_base = m5c; note = sugar modification: 2'-O-methoxyethylribose; note = backbone modification: 5'-phosphorothioate
  modified_base 9: mod_base = OTHER; note = sugar modification: 2'-O-methoxyethylribose; note = thymine; note = backbone modification: 5'-phosphorothioate
  modified_base 10: mod_base = OTHER; note = thymine; note = sugar modification: 2'-O-methoxyethylribose; note = backbone modification: 5'-phosphorothioate
  modified_base 11: mod_base = OTHER; note = backbone modification: 5'-phosphorothioate; note = sugar modification: 2'-O-methoxyethylribose
  modified_base 12: mod_base = OTHER; note = thymine; note = sugar modification: 2'-O-methoxyethylribose; note = backbone modification: 5'-phosphorothioate
  modified_base 13: mod_base = OTHER; note = sugar modification: 2'-O-methoxyethylribose; note = backbone modification: 5'-phosphorothioate
  modified_base 14: mod_base = m5c; mod_base = OTHER; note = sugar modification: 2'-O-methoxyethylribose; note = backbone modification: 5'-phosphorothioate
  modified_base 15: mod_base = OTHER; note = sugar modification: 2'-O-methoxyethylribose; note = thymine; note = backbone modification: 5'-phosphorothioate
  modified_base 16: mod_base = OTHER; note = thymine; note = sugar modification: 2'-O-methoxyethylribose; note = backbone modification: 5'-phosphorothioate
  modified_base 17: mod_base = m5c; mod_base = OTHER; note = sugar modification: lna; note = backbone modification: 5'-phosphorothioate
  modified_base 18: mod_base = OTHER; note = sugar modification: lna; note = backbone modification: 5'-phosphorothioate
  modified_base 19: mod_base = OTHER; note = thymine; note = sugar modification: lna
aggtgttcttgtacttcat

SEQ ID NO: 650 - RNA, 19 nt, synthetic construct
  source 1..19: mol_type = other RNA; note = Antisense oligonucleotide
  modified_base 1: mod_base = OTHER; note = backbone modification: 5'-phosphorothioate; note = sugar modification: lna
  modified_base 2: mod_base = OTHER; note = backbone modification: 5'-phosphorothioate; note = sugar modification: lna
  modified_base 3: mod_base = OTHER; note = sugar modification: lna; note = backbone modification: 5'-phosphorothioate
  modified_base 4: mod_base = OTHER; note = backbone modification: 5'-phosphorothioate; note = sugar modification: 2'-O-methoxyethylribose
  modified_base 5: mod_base = OTHER; note = thymine; note = backbone modification: 5'-phosphorothioate; note = sugar modification: 2'-O-methoxyethylribose
  modified_base 6: mod_base = OTHER; note = backbone modification: 5'-phosphorothioate; note = sugar modification: 2'-O-methoxyethylribose
  modified_base 7: mod_base = OTHER; note = thymine; note = backbone modification: 5'-phosphorothioate; note = sugar modification: 2'-O-methoxyethylribose
  modified_base 8: mod_base = OTHER; note = backbone modification: 5'-phosphorothioate; note = thymine; note = sugar modification: 2'-O-methoxyethylribose
  modified_base 9: mod_base = m5c; mod_base = OTHER; note = sugar modification: 2'-O-methoxyethylribose; note = backbone modification: 5'-phosphorothioate
  modified_base 10: mod_base = OTHER; note = sugar modification: 2'-O-methoxyethylribose; note = backbone modification: 5'-phosphorothioate; note = thymine
  modified_base 11: mod_base = OTHER; note = sugar modification: 2'-O-methoxyethylribose; note = thymine; note = backbone modification: 5'-phosphorothioate
  modified_base 12: mod_base = OTHER; note = sugar modification: 2'-O-methoxyethylribose; note = backbone modification: 5'-phosphorothioate
  modified_base 13: mod_base = OTHER; note = thymine; note = sugar modification: 2'-O-methoxyethylribose; note = backbone modification: 5'-phosphorothioate
  modified_base 14: mod_base = OTHER; note = backbone modification: 5'-phosphorothioate; note = sugar modification: 2'-O-methoxyethylribose
  modified_base 15: mod_base = m5c; mod_base = OTHER; note = backbone modification: 5'-phosphorothioate; note = sugar modification: 2'-O-methoxyethylribose
  modified_base 16: mod_base = OTHER; note = backbone modification: 5'-phosphorothioate; note = sugar modification: 2'-O-methoxyethylribose; note = thymine
  modified_base 17: mod_base = OTHER; note = backbone modification: 5'-phosphorothioate; note = sugar modification: lna; note = thymine
  modified_base 18: mod_base = OTHER; mod_base = m5c; note = backbone modification: 5'-phosphorothioate; note = sugar modification: lna
  modified_base 19: mod_base = OTHER; note = sugar modification: lna
aaggtgttcttgtacttca

SEQ ID NO: 651 - RNA, 20 nt, synthetic construct
  source 1..20: mol_type = other RNA; note = Antisense oligonucleotide
  modified_base 1: mod_base = OTHER; note = thymine; note = sugar modification: 2'-O-methoxyethylribose; note = backbone modification: 5'-phosphorothioate
  modified_base 2: mod_base = OTHER; note = sugar modification: 2'-O-methoxyethylribose; note = backbone modification: 5'-phosphorothioate
  modified_base 3: mod_base = OTHER; note = sugar modification: 2'-O-methoxyethylribose; note = backbone modification: 5'-phosphorothioate; note = thymine
  modified_base 4: mod_base = OTHER; note = backbone modification: 5'-phosphorothioate; note = sugar modification: 2'-O-methoxyethylribose; note = thymine
  modified_base 5: mod_base = OTHER; mod_base = m5c; note = sugar modification: 2'-O-methoxyethylribose; note = backbone modification: 5'-phosphorothioate
  modified_base 6: mod_base = OTHER; note = backbone modification: 5'-phosphorothioate; note = thymine; note = sugar modification: 2'-O-methoxyethylribose
  modified_base 7: mod_base = OTHER; note = thymine; note = backbone modification: 5'-phosphorothioate; note = sugar modification: 2'-O-methoxyethylribose
  modified_base 8: mod_base = OTHER; note = backbone modification: 5'-phosphorothioate; note = sugar modification: 2'-O-methoxyethylribose
  modified_base 9: mod_base = OTHER; note = backbone modification: 5'-phosphorothioate; note = sugar modification: 2'-O-methoxyethylribose; note = thymine
  modified_base 10: mod_base = OTHER; note = backbone modification: 5'-phosphorothioate; note = sugar modification: 2'-O-methoxyethylribose
  modified_base 11: mod_base = OTHER; mod_base = m5c; note = backbone modification: 5'-phosphorothioate; note = sugar modification: 2'-O-methoxyethylribose
  modified_base 12: mod_base = OTHER; note = backbone modification: 5'-phosphorothioate; note = thymine; note = sugar modification: 2'-O-methoxyethylribose
  modified_base 13: mod_base = OTHER; note = backbone modification: 5'-phosphorothioate; note = thymine; note = sugar modification: 2'-O-methoxyethylribose
  modified_base 14: mod_base = m5c; mod_base = OTHER; note = sugar modification: 2'-O-methoxyethylribose; note = backbone modification: 5'-phosphorothioate
  modified_base 15: mod_base = OTHER; note = backbone modification: 5'-phosphorothioate; note = sugar modification: 2'-O-methoxyethylribose
  modified_base 16: mod_base = OTHER; note = sugar modification: 2'-O-methoxyethylribose; note = thymine; note = backbone modification: 5'-phosphorothioate
  modified_base 17: mod_base = m5c; mod_base = OTHER; note = backbone modification: 5'-phosphorothioate; note = sugar modification: 2'-O-methoxyethylribose
  modified_base 18: mod_base = OTHER; mod_base = m5c; note = sugar modification: 2'-O-methoxyethylribose; note = backbone modification: 5'-phosphorothioate
  modified_base 19: mod_base = m5c; mod_base = OTHER; note = backbone modification: 5'-phosphorothioate; note = sugar modification: 2'-O-methoxyethylribose
  modified_base 20: mod_base = OTHER; note = sugar modification: 2'-O-methoxyethylribose
tgttcttgtacttcatccca

SEQ ID NO: 652 - RNA, 20 nt, synthetic construct
  source 1..20: mol_type = other RNA; note = Antisense oligonucleotide
  modified_base 1: mod_base = OTHER; note = sugar modification: 2'-O-methoxyethylribose; note = backbone modification: 5'-phosphorothioate
  modified_base 2: mod_base = OTHER; note = backbone modification: 5'-phosphorothioate; note = thymine; note = sugar modification: 2'-O-methoxyethylribose
  modified_base 3: mod_base = OTHER; note = sugar modification: 2'-O-methoxyethylribose; note = backbone modification: 5'-phosphorothioate
  modified_base 4: mod_base = OTHER; note = sugar modification: 2'-O-methoxyethylribose; note = thymine; note = backbone modification: 5'-phosphorothioate
  modified_base 5: mod_base = OTHER; note = thymine; note = sugar modification: 2'-O-methoxyethylribose; note = backbone modification: 5'-phosphorothioate
  modified_base 6: mod_base = OTHER; mod_base = m5c; note = backbone modification: 5'-phosphorothioate; note = sugar modification: 2'-O-methoxyethylribose
  modified_base 7: mod_base = OTHER; note = sugar modification: 2'-O-methoxyethylribose; note = backbone modification: 5'-phosphorothioate; note = thymine
  modified_base 8: mod_base = OTHER; note = thymine; note = backbone modification: 5'-phosphorothioate; note = sugar modification: 2'-O-methoxyethylribose
  modified_base 9: mod_base = OTHER; note = backbone modification: 5'-phosphorothioate; note = sugar modification: 2'-O-methoxyethylribose
  modified_base 10: mod_base = OTHER; note = backbone modification: 5'-phosphorothioate; note = sugar modification: 2'-O-methoxyethylribose; note = thymine
  modified_base 11: mod_base = OTHER; note = backbone modification: 5'-phosphorothioate; note = sugar modification: 2'-O-methoxyethylribose
  modified_base 12: mod_base = m5c; mod_base = OTHER; note = sugar modification: 2'-O-methoxyethylribose; note = backbone modification: 5'-phosphorothioate
  modified_base 13: mod_base = OTHER; note = backbone modification: 5'-phosphorothioate; note = sugar modification: 2'-O-methoxyethylribose; note = thymine
  modified_base 14: mod_base = OTHER; note = backbone modification: 5'-phosphorothioate; note = thymine; note = sugar modification: 2'-O-methoxyethylribose
  modified_base 15: mod_base = OTHER; mod_base = m5c; note = sugar modification: 2'-O-methoxyethylribose; note = backbone modification: 5'-phosphorothioate
  modified_base 16: mod_base = OTHER; note = backbone modification: 5'-phosphorothioate; note = sugar modification: 2'-O-methoxyethylribose
  modified_base 17: mod_base = OTHER; note = sugar modification: 2'-O-methoxyethylribose; note = thymine; note = backbone modification: 5'-phosphorothioate
  modified_base 18: mod_base = OTHER; mod_base = m5c; note = backbone modification: 5'-phosphorothioate; note = sugar modification: 2'-O-methoxyethylribose
  modified_base 19: mod_base = m5c; mod_base = OTHER; note = backbone modification: 5'-phosphorothioate; note = sugar modification: 2'-O-methoxyethylribose
  modified_base 20: mod_base = OTHER; mod_base = m5c; note = sugar modification: 2'-O-methoxyethylribose
gtgttcttgtacttcatccc

SEQ ID NO: 653 - RNA, 20 nt, synthetic construct
  source 1..20: mol_type = other RNA; note = Antisense oligonucleotide
  modified_base 1: mod_base = OTHER; note = backbone modification: 5'-phosphorothioate; note = sugar modification: lna; note = thymine
  modified_base 2: mod_base = OTHER; note = backbone modification: 5'-phosphorothioate; note = sugar modification: lna
  modified_base 3: mod_base = OTHER; note = backbone modification: 5'-phosphorothioate; note = thymine; note = sugar modification: lna
  modified_base 4: mod_base = OTHER; note = sugar modification: 2'-O-methoxyethylribose; note = backbone modification: 5'-phosphorothioate; note = thymine
  modified_base 5: mod_base = m5c; mod_base = OTHER; note = sugar modification: 2'-O-methoxyethylribose; note = backbone modification: 5'-phosphorothioate
  modified_base 6: mod_base = OTHER; note = thymine; note = sugar modification: 2'-O-methoxyethylribose; note = backbone modification: 5'-phosphorothioate
  modified_base 7: mod_base = OTHER; note = sugar modification: 2'-O-methoxyethylribose; note = thymine; note = backbone modification: 5'-phosphorothioate
  modified_base 8: mod_base = OTHER; note = backbone modification: 5'-phosphorothioate; note = sugar modification: 2'-O-methoxyethylribose
  modified_base 9: mod_base = OTHER; note = backbone modification: 5'-phosphorothioate; note = sugar modification: 2'-O-methoxyethylribose; note = thymine
  modified_base 10: mod_base = OTHER; note = backbone modification: 5'-phosphorothioate; note = sugar modification: 2'-O-methoxyethylribose
  modified_base 11: mod_base = OTHER; mod_base = m5c; note = sugar modification: 2'-O-methoxyethylribose; note = backbone modification: 5'-phosphorothioate
  modified_base 12: mod_base = OTHER; note = thymine; note = backbone modification: 5'-phosphorothioate; note = sugar modification: 2'-O-methoxyethylribose
  modified_base 13: mod_base = OTHER; note = backbone modification: 5'-phosphorothioate; note = sugar modification: 2'-O-methoxyethylribose; note = thymine
  modified_base 14: mod_base = OTHER; mod_base = m5c; note = sugar modification: 2'-O-methoxyethylribose; note = backbone modification: 5'-phosphorothioate
  modified_base 15: mod_base = OTHER; note = backbone modification: 5'-phosphorothioate; note = sugar modification: 2'-O-methoxyethylribose
  modified_base 16: mod_base = OTHER; note = backbone modification: 5'-phosphorothioate; note = thymine; note = sugar modification: 2'-O-methoxyethylribose
  modified_base 17: mod_base = m5c; mod_base = OTHER; note = backbone modification: 5'-phosphorothioate; note = sugar modification: 2'-O-methoxyethylribose
  modified_base 18: mod_base = m5c; mod_base = OTHER; note = backbone modification: 5'-phosphorothioate; note = sugar modification: lna
  modified_base 19: mod_base = OTHER; mod_base = m5c; note = sugar modification: lna; note = backbone modification: 5'-phosphorothioate
  modified_base 20: mod_base = OTHER; note = sugar modification: lna
tgttcttgtacttcatccca

SEQ ID NO: 654 - RNA, 20 nt, synthetic construct
  source 1..20: mol_type = other RNA; note = Antisense oligonucleotide
  modified_base 1: mod_base = OTHER; note = backbone modification: 5'-phosphorothioate; note = sugar modification: lna
  modified_base 2: mod_base = OTHER; note = sugar modification: lna; note = backbone modification: 5'-phosphorothioate; note = thymine
  modified_base 3: mod_base = OTHER; note = backbone modification: 5'-phosphorothioate; note = sugar modification: lna
  modified_base 4: mod_base = OTHER; note = backbone modification: 5'-phosphorothioate; note = thymine; note = sugar modification: 2'-O-methoxyethylribose
  modified_base 5: mod_base = OTHER; note = thymine; note = backbone modification: 5'-phosphorothioate; note = sugar modification: 2'-O-methoxyethylribose
  modified_base 6: mod_base = OTHER; mod_base = m5c; note = sugar modification: 2'-O-methoxyethylribose; note = backbone modification: 5'-phosphorothioate
  modified_base 7: mod_base = OTHER; note = sugar modification: 2'-O-methoxyethylribose; note = backbone modification: 5'-phosphorothioate; note = thymine
  modified_base 8: mod_base = OTHER; note = thymine; note = backbone modification: 5'-phosphorothioate; note = sugar modification: 2'-O-methoxyethylribose
  modified_base 9: mod_base = OTHER; note = sugar modification: 2'-O-methoxyethylribose; note = backbone modification: 5'-phosphorothioate
  modified_base 10: mod_base = OTHER; note = backbone modification: 5'-phosphorothioate; note = thymine; note = sugar modification: 2'-O-methoxyethylribose
  modified_base 11: mod_base = OTHER; note = sugar modification: 2'-O-methoxyethylribose; note = backbone modification: 5'-phosphorothioate
  modified_base 12: mod_base = OTHER; mod_base = m5c; note = backbone modification: 5'-phosphorothioate; note = sugar modification: 2'-O-methoxyethylribose
  modified_base 13: mod_base = OTHER; note = backbone modification: 5'-phosphorothioate; note = sugar modification: 2'-O-methoxyethylribose; note = thymine
  modified_base 14: mod_base = OTHER; note = thymine; note = sugar modification: 2'-O-methoxyethylribose; note = backbone modification: 5'-phosphorothioate
  modified_base 15: mod_base = OTHER; mod_base = m5c; note = sugar modification: 2'-O-methoxyethylribose; note = backbone modification: 5'-phosphorothioate
  modified_base 16: mod_base = OTHER; note = sugar modification: 2'-O-methoxyethylribose; note = backbone modification: 5'-phosphorothioate
  modified_base 17: mod_base = OTHER; note = sugar modification: 2'-O-methoxyethylribose; note = thymine; note = backbone modification: 5'-phosphorothioate
  modified_base 18: mod_base = OTHER; mod_base = m5c; note = backbone modification: 5'-phosphorothioate; note = sugar modification: lna
  modified_base 19: mod_base = m5c; mod_base = OTHER; note = backbone modification: 5'-phosphorothioate; note = sugar modification: lna
  modified_base 20: mod_base = m5c; mod_base = OTHER; note = sugar modification: lna
gtgttcttgtacttcatccc

SEQ ID NO: 655 - RNA, 36 nt, synthetic construct; identical to SEQ ID NO: 209
  source 1..36: mol_type = other RNA; note = Antisense oligonucleotide
  modified_base 1: mod_base = OTHER; note = backbone modification: 5'-phosphorothioate; note = sugar modification: 2'-O-methoxyethylribose
  modified_base 2: mod_base = OTHER; note = backbone modification: 5'-phosphorothioate; note = sugar modification: 2'-O-methoxyethylribose
  modified_base 3: mod_base = m5c; mod_base = OTHER; note = sugar modification: 2'-O-methoxyethylribose; note = backbone modification: 5'-phosphorothioate
  modified_base 4: mod_base = OTHER; mod_base = m5c; note = backbone modification: 5'-phosphorothioate; note = sugar modification: 2'-O-methoxyethylribose
  modified_base 5: mod_base = OTHER; note = backbone modification: 5'-phosphorothioate; note = sugar modification: 2'-O-methoxyethylribose
  modified_base 6: mod_base = OTHER; note = thymine; note = backbone modification: 5'-phosphorothioate; note = sugar modification: 2'-O-methoxyethylribose
  modified_base 7: mod_base = OTHER; note = sugar modification: 2'-O-methoxyethylribose; note = backbone modification: 5'-phosphorothioate; note = thymine
  modified_base 8: mod_base = OTHER; note = sugar modification: 2'-O-methoxyethylribose; note = backbone modification: 5'-phosphorothioate
  modified_base 9: mod_base = OTHER; note = sugar modification: 2'-O-methoxyethylribose; note = thymine; note = backbone modification: 5'-phosphorothioate
  modified_base 10: mod_base = OTHER; note = backbone modification: 5'-phosphorothioate; note = sugar modification: 2'-O-methoxyethylribose
  modified_base 11: mod_base = OTHER; note = sugar modification: 2'-O-methoxyethylribose; note = thymine; note = backbone modification: 5'-phosphorothioate
  modified_base 12: mod_base = OTHER; note = thymine; note = sugar modification: 2'-O-methoxyethylribose; note = backbone modification: 5'-phosphorothioate
  modified_base 13: mod_base = OTHER; note = sugar modification: 2'-O-methoxyethylribose; note = backbone modification: 5'-phosphorothioate
  modified_base 14: mod_base = OTHER; note = sugar modification: 2'-O-methoxyethylribose; note = backbone modification: 5'-phosphorothioate
  modified_base 15: mod_base = OTHER; note = backbone modification: 5'-phosphorothioate; note = sugar modification: 2'-O-methoxyethylribose
  modified_base 16: mod_base = OTHER; note = sugar modification: 2'-O-methoxyethylribose; note = backbone modification: 5'-phosphorothioate; note = thymine
  modified_base 17: mod_base = m5c; mod_base = OTHER; note = backbone modification: 5'-phosphorothioate; note = sugar modification: 2'-O-methoxyethylribose
  modified_base 18: mod_base = OTHER; mod_base = m5c; note = sugar modification: 2'-O-methoxyethylribose; note = backbone modification: 5'-phosphorothioate
  modified_base 19: mod_base = OTHER; note = sugar modification: 2'-O-methoxyethylribose; note = backbone modification: 5'-phosphorothioate; note = thymine
  modified_base 20: mod_base = OTHER; note = backbone modification: 5'-phosphorothioate; note = sugar modification: 2'-O-methoxyethylribose
  modified_base 21: mod_base = OTHER; note = thymine; note = backbone modification: 5'-phosphorothioate; note = sugar modification: 2'-O-methoxyethylribose
  modified_base 22: mod_base = OTHER; note = backbone modification: 5'-phosphorothioate; note = thymine; note = sugar modification: 2'-O-methoxyethylribose
  modified_base 23: mod_base = OTHER; mod_base = m5c; note = backbone modification: 5'-phosphorothioate; note = sugar modification: 2'-O-methoxyethylribose
  modified_base 24: mod_base = OTHER; note = sugar modification: 2'-O-methoxyethylribose; note = thymine; note = backbone modification: 5'-phosphorothioate
  modified_base 25: mod_base = OTHER; note = sugar modification: 2'-O-methoxyethylribose; note = backbone modification: 5'-phosphorothioate; note = thymine
  modified_base 26: mod_base = OTHER; note = backbone modification: 5'-phosphorothioate; note = sugar modification: 2'-O-methoxyethylribose
  modified_base 27: mod_base = OTHER; note = backbone modification: 5'-phosphorothioate; note = thymine; note = sugar modification: 2'-O-methoxyethylribose
  modified_base 28: mod_base = OTHER; note = sugar modification: 2'-O-methoxyethylribose; note = backbone modification: 5'-phosphorothioate
  modified_base 29: mod_base = m5c; mod_base = OTHER; note = backbone modification: 5'-phosphorothioate; note = sugar modification: 2'-O-methoxyethylribose
  modified_base 30: mod_base = OTHER; note = sugar modification: 2'-O-methoxyethylribose; note = thymine; note = backbone modification: 5'-phosphorothioate
  modified_base 31: mod_base = OTHER; note = backbone modification: 5'-phosphorothioate; note = thymine; note = sugar modification: 2'-O-methoxyethylribose
  modified_base 32: mod_base = m5c; mod_base = OTHER; note = sugar modification: 2'-O-methoxyethylribose; note = backbone modification: 5'-phosphorothioate
  modified_base 33: mod_base = OTHER; note = sugar modification: 2'-O-methoxyethylribose; note = backbone modification: 5'-phosphorothioate
  modified_base 34: mod_base = OTHER; note = backbone modification: 5'-phosphorothioate; note = sugar modification: 2'-O-methoxyethylribose; note = thymine
  modified_base 35: mod_base = OTHER; mod_base = m5c; note = sugar modification: 2'-O-methoxyethylribose; note = backbone modification: 5'-phosphorothioate
  modified_base 36: mod_base = m5c; mod_base = OTHER; note = sugar modification: 2'-O-methoxyethylribose

SEQ ID NO: 656 - RNA, 36 nt, synthetic construct; identical to SEQ ID NO: 210
  source 1..36: mol_type = other RNA; note = Antisense oligonucleotide
  modified_base 1: mod_base = OTHER; note = sugar modification: 2'-O-methoxyethylribose; note = backbone modification: 5'-phosphorothioate; note = thymine
  modified_base 2: mod_base = OTHER; note = backbone modification: 5'-phosphorothioate; note = sugar modification: 2'-O-methoxyethylribose
  modified_base 3: mod_base = OTHER; note = sugar modification: 2'-O-methoxyethylribose; note = backbone modification: 5'-phosphorothioate; note = thymine
  modified_base 4: mod_base = OTHER; note = sugar modification: 2'-O-methoxyethylribose; note = backbone modification: 5'-phosphorothioate; note = thymine
  modified_base 5: mod_base = OTHER; mod_base = m5c; note = backbone modification: 5'-phosphorothioate; note = sugar modification: 2'-O-methoxyethylribose
  modified_base 6: mod_base = OTHER; note = backbone modification: 5'-phosphorothioate; note = thymine; note = sugar modification: 2'-O-methoxyethylribose
  modified_base 7: mod_base = OTHER; note = backbone modification: 5'-phosphorothioate; note = sugar modification: 2'-O-methoxyethylribose; note = thymine
  modified_base 8: mod_base = OTHER; note = sugar modification: 2'-O-methoxyethylribose; note = backbone modification: 5'-phosphorothioate
  modified_base 9: mod_base = OTHER; note = backbone modification: 5'-phosphorothioate; note = thymine; note = sugar modification: 2'-O-methoxyethylribose
  modified_base 10: mod_base = OTHER; note = sugar modification: 2'-O-methoxyethylribose; note = backbone modification: 5'-phosphorothioate
  modified_base 11: mod_base = m5c; mod_base = OTHER; note = sugar modification: 2'-O-methoxyethylribose; note = backbone modification: 5'-phosphorothioate
  modified_base 12: mod_base = OTHER; note = backbone modification: 5'-phosphorothioate; note = thymine; note = sugar modification: 2'-O-methoxyethylribose
  modified_base 13: mod_base = OTHER; note = sugar modification: 2'-O-methoxyethylribose; note = backbone modification: 5'-phosphorothioate; note = thymine
  modified_base 14: mod_base = m5c; mod_base = OTHER; note = sugar modification: 2'-O-methoxyethylribose; note = backbone modification: 5'-phosphorothioate
  modified_base 15: mod_base = OTHER; note = backbone modification: 5'-phosphorothioate; note = sugar modification: 2'-O-methoxyethylribose
  modified_base 16: mod_base = OTHER; note = sugar modification: 2'-O-methoxyethylribose; note = thymine; note = backbone modification: 5'-phosphorothioate
  modified_base 17: mod_base = m5c; mod_base = OTHER; note = backbone modification: 5'-phosphorothioate; note = sugar modification: 2'-O-methoxyethylribose
  modified_base 18: mod_base = OTHER; mod_base = m5c; note = sugar modification: 2'-O-methoxyethylribose; note = backbone modification: 5'-phosphorothioate
  modified_base 19: mod_base = OTHER; note = sugar modification: 2'-O-methoxyethylribose; note = backbone modification: 5'-phosphorothioate
  modified_base 20: mod_base = OTHER; note = sugar modification: 2'-O-methoxyethylribose; note = backbone modification: 5'-phosphorothioate
  modified_base 21: mod_base = OTHER; mod_base = m5c; note = backbone modification: 5'-phosphorothioate; note = sugar modification: 2'-O-methoxyethylribose
  modified_base 22: mod_base = m5c; mod_base = OTHER; note = backbone modification: 5'-phosphorothioate; note = sugar modification: 2'-O-methoxyethylribose
  modified_base 23: mod_base = OTHER; note = sugar modification: 2'-O-methoxyethylribose; note = backbone modification: 5'-phosphorothioate
  modified_base 24: mod_base = OTHER; note = sugar modification: 2'-O-methoxyethylribose; note = backbone modification: 5'-phosphorothioate; note = thymine
  modified_base 25: mod_base = OTHER; note = thymine; note = backbone modification: 5'-phosphorothioate; note = sugar modification: 2'-O-methoxyethylribose
  modified_base 26: mod_base = OTHER; note = backbone modification: 5'-phosphorothioate; note = sugar modification: 2'-O-methoxyethylribose
  modified_base 27: mod_base = OTHER; note = backbone modification: 5'-phosphorothioate; note = sugar modification: 2'-O-methoxyethylribose; note = thymine
  modified_base 28: mod_base = OTHER; note = backbone modification: 5'-phosphorothioate; note = sugar modification: 2'-O-methoxyethylribose
  modified_base 29: mod_base = OTHER; note = backbone modification: 5'-phosphorothioate; note = sugar modification: 2'-O-methoxyethylribose; note = thymine
  modified_base 30: mod_base = OTHER; note = backbone modification: 5'-phosphorothioate; note = thymine; note = sugar modification: 2'-O-methoxyethylribose
  modified_base 31: mod_base = OTHER; note = backbone modification: 5'-phosphorothioate; note = sugar modification: 2'-O-methoxyethylribose
  modified_base 32: mod_base = OTHER; note = backbone modification: 5'-phosphorothioate; note = sugar modification: 2'-O-methoxyethylribose
  modified_base 33: mod_base = OTHER; note = backbone modification: 5'-phosphorothioate; note = sugar modification: 2'-O-methoxyethylribose
  modified_base 34: mod_base = OTHER; note = sugar modification: 2'-O-methoxyethylribose; note = backbone modification: 5'-phosphorothioate; note = thymine
  modified_base 35: mod_base = OTHER; mod_base = m5c; note = backbone modification: 5'-phosphorothioate; note = sugar modification: 2'-O-methoxyethylribose
  modified_base 36: mod_base = m5c; mod_base = OTHER; note = sugar modification: 2'-O-methoxyethylribose

SEQ ID NO: 657 - RNA, 32 nt, synthetic construct; identical to SEQ ID NO: 211
  source 1..32: mol_type = other RNA; note = Antisense oligonucleotide
  modified_base 1: mod_base = OTHER; mod_base = m5c; note = sugar modification: 2'-O-methoxyethylribose; note = backbone modification: 5'-phosphorothioate
  modified_base 2: mod_base = OTHER; mod_base = m5c; note = backbone modification: 5'-phosphorothioate; note = sugar modification: 2'-O-methoxyethylribose
  modified_base 3: mod_base = OTHER; note = sugar modification: 2'-O-methoxyethylribose; note = backbone modification: 5'-phosphorothioate
  modified_base 4: mod_base = OTHER; note = sugar modification: 2'-O-methoxyethylribose; note = thymine; note = backbone modification: 5'-phosphorothioate
  modified_base 5: mod_base = OTHER; note = backbone modification: 5'-phosphorothioate; note = thymine; note = sugar modification: 2'-O-methoxyethylribose
  modified_base 6: mod_base = OTHER; note = backbone modification: 5'-phosphorothioate; note = sugar modification: 2'-O-methoxyethylribose
  modified_base 7: mod_base = OTHER; note = thymine; note = backbone modification: 5'-phosphorothioate; note = sugar modification: 2'-O-methoxyethylribose
  modified_base 8: mod_base = OTHER; note = sugar modification: 2'-O-methoxyethylribose; note = backbone modification: 5'-phosphorothioate
  modified_base 9: mod_base = OTHER; note = thymine; note = backbone modification: 5'-phosphorothioate; note = sugar modification: 2'-O-methoxyethylribose
  modified_base 10: mod_base = OTHER; note = backbone modification: 5'-phosphorothioate; note = thymine; note = sugar modification: 2'-O-methoxyethylribose
  modified_base 11: mod_base = OTHER; note = backbone modification: 5'-phosphorothioate; note = sugar modification: 2'-O-methoxyethylribose
  modified_base 12: mod_base = OTHER; note = sugar modification: 2'-O-methoxyethylribose; note = backbone modification: 5'-phosphorothioate
  modified_base 13: mod_base = OTHER; note = sugar modification: 2'-O-methoxyethylribose; note = backbone modification: 5'-phosphorothioate
  modified_base 14: mod_base = OTHER; note = backbone modification: 5'-phosphorothioate; note = sugar modification: 2'-O-methoxyethylribose; note = thymine
  modified_base 15: mod_base = m5c; mod_base = OTHER; note = backbone modification: 5'-phosphorothioate; note = sugar modification: 2'-O-methoxyethylribose
  modified_base 16: mod_base = OTHER; mod_base = m5c; note = backbone modification: 5'-phosphorothioate; note = sugar modification: 2'-O-methoxyethylribose
  modified_base 17: mod_base = OTHER; note = backbone modification: 5'-phosphorothioate; note = sugar modification: 2'-O-methoxyethylribose
  modified_base 18: mod_base = OTHER; note = thymine; note = backbone modification: 5'-phosphorothioate; note = sugar modification: 2'-O-methoxyethylribose
  modified_base 19: mod_base = OTHER; note = sugar modification: 2'-O-methoxyethylribose; note = thymine; note = backbone modification: 5'-phosphorothioate
  modified_base 20: mod_base = OTHER; mod_base = m5c; note = sugar modification: 2'-O-methoxyethylribose; note = backbone modification: 5'-phosphorothioate
  modified_base 21: mod_base = OTHER; note = sugar modification: 2'-O-methoxyethylribose; note = thymine; note = backbone modification: 5'-phosphorothioate
  modified_base 22: mod_base = OTHER; note = backbone modification: 5'-phosphorothioate; note = sugar modification: 2'-O-methoxyethylribose; note = thymine
  modified_base 23: mod_base = OTHER; note = sugar modification: 2'-O-methoxyethylribose; note = backbone modification: 5'-phosphorothioate
  modified_base 24: mod_base = OTHER; note = backbone modification: 5'-phosphorothioate; note = sugar modification: 2'-O-methoxyethylribose; note = thymine
  modified_base 25: mod_base = OTHER; note = backbone modification: 5'-phosphorothioate; note = sugar modification: 2'-O-methoxyethylribose
  modified_base 26: mod_base = m5c; mod_base = OTHER; note = backbone modification: 5'-phosphorothioate; note = sugar modification: 2'-O-methoxyethylribose
  modified_base 27: mod_base = OTHER; note = backbone modification: 5'-phosphorothioate; note = thymine; note = sugar modification: 2'-O-methoxyethylribose
  modified_base 28: mod_base = OTHER; note = sugar modification: 2'-O-methoxyethylribose; note = backbone modification: 5'-phosphorothioate; note = thymine
  modified_base 29: mod_base = m5c; mod_base = OTHER; note = backbone modification: 5'-phosphorothioate; note = sugar modification: 2'-O-methoxyethylribose
  modified_base 30: mod_base = OTHER; note = backbone modification: 5'-phosphorothioate; note = sugar modification: 2'-O-methoxyethylribose
  modified_base 31: mod_base = OTHER; note = thymine; note = backbone modification: 5'-phosphorothioate; note = sugar modification: 2'-O-methoxyethylribose
  modified_base 32: mod_base = OTHER; mod_base = m5c; note = sugar modification: 2'-O-methoxyethylribose

SEQ ID NO: 658 - RNA, 32 nt, synthetic construct; identical to SEQ ID NO: 212
  source 1..32: mol_type = other RNA; note = Antisense oligonucleotide
  modified_base 1: mod_base = OTHER; note = backbone modification: 5'-phosphorothioate; note = sugar modification: 2'-O-methoxyethylribose
  modified_base 2: mod_base = OTHER; note = thymine; note = backbone modification: 5'-phosphorothioate; note = sugar modification: 2'-O-methoxyethylribose
  modified_base 3: mod_base = OTHER; note = backbone modification: 5'-phosphorothioate; note = sugar modification: 2'-O-methoxyethylribose; note = thymine
  modified_base 4: mod_base = m5c; mod_base = OTHER; note = sugar modification: 2'-O-methoxyethylribose; note = backbone modification: 5'-phosphorothioate
  modified_base 5: mod_base = OTHER; note = backbone modification: 5'-phosphorothioate; note = thymine; note = sugar modification: 2'-O-methoxyethylribose
  modified_base 6: mod_base = OTHER; note = sugar modification: 2'-O-methoxyethylribose; note = backbone modification: 5'-phosphorothioate; note = thymine
  modified_base 7: mod_base = OTHER; note = backbone modification: 5'-phosphorothioate; note = sugar modification: 2'-O-methoxyethylribose
  modified_base 8: mod_base = OTHER; note = sugar modification: 2'-O-methoxyethylribose; note = backbone modification: 5'-phosphorothioate; note = thymine
  modified_base 9: mod_base = OTHER; note = sugar modification: 2'-O-methoxyethylribose; note = backbone modification: 5'-phosphorothioate
  modified_base 10: mod_base = OTHER; mod_base = m5c; note = backbone modification: 5'-phosphorothioate; note = sugar modification: 2'-O-methoxyethylribose
  modified_base 11: mod_base = OTHER; note = sugar modification: 2'-O-methoxyethylribose; note = backbone modification: 5'-phosphorothioate; note = thymine
  modified_base 12: mod_base = OTHER; note = backbone modification: 5'-phosphorothioate; note = thymine; note = sugar modification: 2'-O-methoxyethylribose
  modified_base 13: mod_base = m5c; mod_base = OTHER; note = sugar modification: 2'-O-methoxyethylribose; note = backbone modification: 5'-phosphorothioate
  modified_base 14: mod_base = OTHER; note = backbone modification: 5'-phosphorothioate; note = sugar modification: 2'-O-methoxyethylribose
  modified_base 15: mod_base = OTHER; note = backbone modification: 5'-phosphorothioate; note = sugar modification: 2'-O-methoxyethylribose; note = thymine
  modified_base 16: mod_base = OTHER; mod_base = m5c; note = sugar modification: 2'-O-methoxyethylribose; note = backbone modification: 5'-phosphorothioate
  modified_base 17: mod_base = OTHER; mod_base = m5c; note = backbone modification: 5'-phosphorothioate; note = sugar modification: 2'-O-methoxyethylribose
  modified_base 18: mod_base = OTHER; mod_base = m5c; note = backbone modification: 5'-phosphorothioate; note = sugar modification: 2'-O-methoxyethylribose
  modified_base 19: mod_base = OTHER; note = sugar modification: 2'-O-methoxyethylribose; note = backbone modification: 5'-phosphorothioate
  modified_base 20: mod_base = OTHER; note = backbone modification: 5'-phosphorothioate; note = thymine; note = sugar modification: 2'-O-methoxyethylribose
  modified_base 21: mod_base = OTHER; note = sugar modification: 2'-O-methoxyethylribose; note = thymine; note = backbone modification: 5'-phosphorothioate
  modified_base 22: mod_base = OTHER; note = sugar modification: 2'-O-methoxyethylribose; note = backbone modification: 5'-phosphorothioate
  modified_base 23: mod_base = OTHER; note = sugar modification: 2'-O-methoxyethylribose; note = thymine; note = backbone modification: 5'-phosphorothioate
  modified_base 24: mod_base = OTHER; note = backbone modification: 5'-phosphorothioate; note = sugar modification: 2'-O-methoxyethylribose
  modified_base 25: mod_base = OTHER; note = backbone modification: 5'-phosphorothioate; note = sugar modification: 2'-O-methoxyethylribose; note = thymine
  modified_base 26: mod_base = OTHER; note = backbone modification: 5'-phosphorothioate; note = sugar modification: 2'-O-methoxyethylribose; note = thymine
  modified_base 27: mod_base = OTHER; note = sugar modification: 2'-O-methoxyethylribose; note = backbone modification: 5'-phosphorothioate
  modified_base 28: mod_base = OTHER; note = sugar modification: 2'-O-methoxyethylribose; note = backbone modification: 5'-phosphorothioate
  modified_base 29: mod_base = OTHER; note = sugar modification: 2'-O-methoxyethylribose; note = backbone modification: 5'-phosphorothioate
  modified_base 30: mod_base = OTHER; note = sugar modification: 2'-O-methoxyethylribose; note = backbone modification: 5'-phosphorothioate; note = thymine
  modified_base 31: mod_base = OTHER; mod_base = m5c; note = sugar modification: 2'-O-methoxyethylribose; note = backbone modification: 5'-phosphorothioate
  modified_base 32: mod_base = m5c; mod_base = OTHER; note = sugar modification: 2'-O-methoxyethylribose

SEQ ID NO: 659 - RNA, 28 nt, synthetic construct
  source 1..28: mol_type = other RNA; note = Antisense oligonucleotide
  modified_base 1: mod_base = OTHER; note = backbone modification: 5'-phosphorothioate; note = sugar modification: 2'-O-methoxyethylribose
  modified_base 2: mod_base = OTHER; note = thymine; note = backbone modification: 5'-phosphorothioate; note = sugar modification: 2'-O-methoxyethylribose
  modified_base 3: mod_base = OTHER; note = sugar modification: 2'-O-methoxyethylribose; note = thymine; note = backbone modification: 5'-phosphorothioate
  modified_base 4: mod_base = OTHER; note = sugar modification: 2'-O-methoxyethylribose; note = backbone modification: 5'-phosphorothioate
  modified_base 5: mod_base = OTHER; note = sugar modification: 2'-O-methoxyethylribose; note = thymine; note = backbone modification: 5'-phosphorothioate
  modified_base 6: mod_base = OTHER; note = sugar modification: 2'-O-methoxyethylribose; note = backbone modification: 5'-phosphorothioate
  modified_base 7: mod_base = OTHER; note = backbone modification: 5'-phosphorothioate; note = sugar modification: 2'-O-methoxyethylribose; note = thymine
  modified_base 8: mod_base = OTHER; note = thymine; note = backbone modification: 5'-phosphorothioate; note = sugar modification: 2'-O-methoxyethylribose
  modified_base 9: mod_base = OTHER; note = backbone modification: 5'-phosphorothioate; note = sugar modification: 2'-O-methoxyethylribose
  modified_base 10: mod_base = OTHER; note = sugar modification: 2'-O-methoxyethylribose; note = backbone modification: 5'-phosphorothioate
  modified_base 11: mod_base = OTHER; note = sugar modification: 2'-O-methoxyethylribose; note = backbone modification: 5'-phosphorothioate
  modified_base 12: mod_base = OTHER; note = sugar modification: 2'-O-methoxyethylribose; note = thymine; note = backbone modification: 5'-phosphorothioate
  modified_base 13: mod_base = m5c; mod_base = OTHER; note = backbone modification: 5'-phosphorothioate; note = sugar modification: 2'-O-methoxyethylribose
  modified_base 14: mod_base = m5c; mod_base = OTHER; note = sugar modification: 2'-O-methoxyethylribose; note = backbone modification: 5'-phosphorothioate
  modified_base 15: mod_base = OTHER; note = sugar modification: 2'-O-methoxyethylribose; note = backbone modification: 5'-phosphorothioate
  modified_base 16: mod_base = OTHER; note = sugar modification: 2'-O-methoxyethylribose; note = backbone modification: 5'-phosphorothioate; note = thymine
  modified_base 17: mod_base = OTHER; note = backbone modification: 5'-phosphorothioate; note = thymine; note = sugar modification: 2'-O-methoxyethylribose
  modified_base 18: mod_base = m5c; mod_base = OTHER; note = sugar modification: 2'-O-methoxyethylribose; note = backbone modification: 5'-phosphorothioate
  modified_base 19: mod_base = OTHER; note = thymine; note = sugar modification: 2'-O-methoxyethylribose; note = backbone modification: 5'-phosphorothioate
  modified_base 20: mod_base = OTHER; note = thymine; note = sugar modification: 2'-O-methoxyethylribose; note = backbone modification: 5'-phosphorothioate
  modified_base 21: mod_base = OTHER; note = backbone modification: 5'-phosphorothioate; note = sugar modification: 2'-O-methoxyethylribose
  modified_base 22: mod_base = OTHER; note = thymine; note = backbone modification: 5'-phosphorothioate; note = sugar modification: 2'-O-methoxyethylribose
  modified_base 23: mod_base = OTHER; note = backbone modification: 5'-phosphorothioate; note = sugar modification: 2'-O-methoxyethylribose
  modified_base 24: mod_base = OTHER; mod_base = m5c; note = sugar modification: 2'-O-methoxyethylribose; note = backbone modification: 5'-phosphorothioate
  modified_base 25: mod_base = OTHER; note = sugar modification: 2'-O-methoxyethylribose; note = thymine; note = backbone modification: 5'-phosphorothioate
  modified_base 26: mod_base = OTHER; note = sugar modification: 2'-O-methoxyethylribose; note = backbone modification: 5'-phosphorothioate; note = thymine
  modified_base 27: mod_base = OTHER; mod_base = m5c; note = backbone modification: 5'-phosphorothioate; note = sugar modification: 2'-O-methoxyethylribose
  modified_base 28: mod_base = OTHER; note = sugar modification: 2'-O-methoxyethylribose
attgtgttgaatccgttcttgtacttca

SEQ ID NO: 660 - RNA, 28 nt, synthetic construct
  source 1..28: mol_type = other RNA; note = Antisense oligonucleotide
  modified_base 1: mod_base = OTHER; note = backbone modification: 5'-phosphorothioate; note = sugar modification: 2'-O-methoxyethylribose
  modified_base 2: mod_base = OTHER; note = backbone modification: 5'-phosphorothioate; note = thymine; note = sugar modification: 2'-O-methoxyethylribose
  modified_base 3: mod_base = OTHER; note = thymine; note = backbone modification: 5'-phosphorothioate; note = sugar modification: 2'-O-methoxyethylribose
  modified_base 4: mod_base = OTHER; mod_base = m5c; note = sugar modification: 2'-O-methoxyethylribose; note = backbone modification: 5'-phosphorothioate
  modified_base 5: mod_base = OTHER; note = sugar modification: 2'-O-methoxyethylribose; note = backbone modification: 5'-phosphorothioate; note = thymine
  modified_base 6: mod_base = OTHER; note = thymine; note = sugar modification: 2'-O-methoxyethylribose; note = backbone modification: 5'-phosphorothioate
  modified_base 7: mod_base = OTHER; note = backbone modification: 5'-phosphorothioate; note = sugar modification: 2'-O-methoxyethylribose
  modified_base 8: mod_base = OTHER; note = backbone modification: 5'-phosphorothioate; note = sugar modification: 2'-O-methoxyethylribose; note = thymine
  modified_base 9: mod_base = OTHER; note = backbone modification: 5'-phosphorothioate; note = sugar modification: 2'-O-methoxyethylribose
  modified_base 10: mod_base = OTHER; mod_base = m5c; note = backbone modification: 5'-phosphorothioate; note = sugar modification: 2'-O-methoxyethylribose
  modified_base 11: mod_base = OTHER; note = backbone modification: 5'-phosphorothioate; note = thymine; note = sugar modification: 2'-O-methoxyethylribose
  modified_base 12: mod_base = OTHER; note = thymine; note = sugar modification: 2'-O-methoxyethylribose; note = backbone modification: 5'-phosphorothioate
  modified_base 13: mod_base = m5c; mod_base = OTHER; note = backbone modification: 5'-phosphorothioate; note = sugar modification: 2'-O-methoxyethylribose
  modified_base 14: mod_base = OTHER; note = backbone modification: 5'-phosphorothioate; note = sugar modification: 2'-O-methoxyethylribose
  modified_base 15: mod_base = OTHER; note = backbone modification: 5'-phosphorothioate; note = sugar modification: 2'-O-methoxyethylribose
  modified_base 16: mod_base = OTHER; note = sugar modification: 2'-O-methoxyethylribose; note = thymine; note = backbone modification: 5'-phosphorothioate
  modified_base 17: mod_base = OTHER; note = backbone modification: 5'-phosphorothioate; note = thymine; note = sugar modification: 2'-O-methoxyethylribose
  modified_base 18: mod_base = OTHER; note = backbone modification: 5'-phosphorothioate; note = sugar modification: 2'-O-methoxyethylribose
  modified_base 19: mod_base = OTHER; note = backbone modification: 5'-phosphorothioate; note = sugar modification: 2'-O-methoxyethylribose; note = thymine
  modified_base 20: mod_base = OTHER; note = backbone modification: 5'-phosphorothioate; note = sugar modification: 2'-O-methoxyethylribose
  modified_base 21: mod_base = OTHER; note = backbone modification: 5'-phosphorothioate; note = thymine; note = sugar modification: 2'-O-methoxyethylribose
  modified_base 22: mod_base = OTHER; note = thymine; note = backbone modification: 5'-phosphorothioate; note = sugar modification: 2'-O-methoxyethylribose
  modified_base 23: mod_base = OTHER; note = sugar modification: 2'-O-methoxyethylribose; note = backbone modification: 5'-phosphorothioate
  modified_base 24: mod_base = OTHER; note = sugar modification: 2'-O-methoxyethylribose; note = backbone modification: 5'-phosphorothioate
  modified_base 25: mod_base = OTHER; note = sugar modification: 2'-O-methoxyethylribose; note = backbone modification: 5'-phosphorothioate
  modified_base 26: mod_base = OTHER; note = backbone modification: 5'-phosphorothioate; note = thymine; note = sugar modification: 2'-O-methoxyethylribose
  modified_base 27: mod_base = OTHER; mod_base = m5c; note = sugar modification: 2'-O-methoxyethylribose; note = backbone modification: 5'-phosphorothioate
  modified_base 28: mod_base = OTHER; mod_base = m5c; note = sugar modification: 2'-O-methoxyethylribose
gttcttgtacttcaattgtgttgaatcc

SEQ ID NO: 661 - RNA, 24 nt, synthetic construct
  source 1..24: mol_type = other RNA; note = Antisense oligonucleotide
  modified_base 1: mod_base = OTHER; note = thymine; note = sugar modification: 2'-O-methoxyethylribose; note = backbone modification: 5'-phosphorothioate
  modified_base 2: mod_base = OTHER; mod_base = m5c; note = sugar modification: 2'-O-methoxyethylribose; note = backbone modification: 5'-phosphorothioate
  modified_base 3: mod_base = OTHER; note = sugar modification: 2'-O-methoxyethylribose; note = thymine; note = backbone modification: 5'-phosphorothioate
  modified_base 4: mod_base = OTHER; note = thymine; note = backbone modification: 5'-phosphorothioate; note = sugar modification: 2'-O-methoxyethylribose
  modified_base 5: mod_base = OTHER; note = sugar modification: 2'-O-methoxyethylribose; note = backbone modification: 5'-phosphorothioate
  modified_base 6: mod_base = OTHER; note = sugar modification: 2'-O-methoxyethylribose; note = thymine; note = backbone modification: 5'-phosphorothioate
  modified_base 7: mod_base = OTHER; note = backbone modification: 5'-phosphorothioate; note = sugar modification: 2'-O-methoxyethylribose
  modified_base 8: mod_base = OTHER; mod_base = m5c; note = sugar modification: 2'-O-methoxyethylribose; note = backbone modification: 5'-phosphorothioate
  modified_base 9: mod_base = OTHER; note = thymine; note = backbone modification: 5'-phosphorothioate; note = sugar modification: 2'-O-methoxyethylribose
  modified_base 10: mod_base = OTHER; note = backbone modification: 5'-phosphorothioate; note = thymine; note = sugar modification: 2'-O-methoxyethylribose
  modified_base 11: mod_base = OTHER; mod_base = m5c; note = backbone modification: 5'-phosphorothioate; note = sugar modification: 2'-O-methoxyethylribose
  modified_base 12: mod_base = OTHER; note = backbone modification: 5'-phosphorothioate; note = sugar modification: 2'-O-methoxyethylribose
  modified_base 13: mod_base = OTHER; note = sugar modification: 2'-O-methoxyethylribose; note = backbone modification: 5'-phosphorothioate; note = thymine
  modified_base 14: mod_base = OTHER; note = sugar modification: 2'-O-methoxyethylribose; note = backbone modification: 5'-phosphorothioate
  modified_base 15: mod_base = OTHER; note = thymine; note = backbone modification: 5'-phosphorothioate; note = sugar modification: 2'-O-methoxyethylribose
  modified_base 16: mod_base = OTHER; note = backbone modification: 5'-phosphorothioate; note = sugar modification: 2'-O-methoxyethylribose
  modified_base 17: mod_base = OTHER; note = thymine; note = sugar modification: 2'-O-methoxyethylribose; note = backbone modification: 5'-phosphorothioate
  modified_base 18: mod_base = OTHER; note = thymine; note = sugar modification: 2'-O-methoxyethylribose; note = backbone modification: 5'-phosphorothioate
  modified_base 19: mod_base = OTHER; note = backbone modification: 5'-phosphorothioate; note = sugar modification: 2'-O-methoxyethylribose
  modified_base 20: mod_base = OTHER; note = sugar modification: 2'-O-methoxyethylribose; note = backbone modification: 5'-phosphorothioate
  modified_base 21: mod_base = OTHER; note = backbone modification: 5'-phosphorothioate; note = sugar modification: 2'-O-methoxyethylribose
  modified_base 22: mod_base = OTHER; note = thymine; note = sugar modification: 2'-O-methoxyethylribose; note = backbone modification: 5'-phosphorothioate
  modified_base 23: mod_base = OTHER; mod_base = m5c; note = sugar modification: 2'-O-methoxyethylribose; note = backbone modification: 5'-phosphorothioate
  modified_base 24: mod_base = m5c; mod_base = OTHER; note = sugar modification: 2'-O-methoxyethylribose
tcttgtacttcatgtgttgaatcc

SEQ ID NO: 662 - RNA, 24 nt, synthetic construct
  source 1..24: mol_type = other RNA; note = Antisense oligonucleotide
  modified_base 1: mod_base = OTHER; note = sugar modification: 2'-O-methoxyethylribose; note = backbone modification: 5'-phosphorothioate; note = thymine
  modified_base 2: mod_base = m5c; mod_base = OTHER; note = sugar modification: 2'-O-methoxyethylribose; note = backbone modification: 5'-phosphorothioate
  modified_base 3: mod_base = OTHER; note = backbone modification: 5'-phosphorothioate; note = thymine; note = sugar modification: 2'-O-methoxyethylribose
  modified_base 4: mod_base = OTHER; note = thymine; note = sugar modification: 2'-O-methoxyethylribose; note = backbone modification: 5'-phosphorothioate
  modified_base 5: mod_base = OTHER; note = sugar modification: 2'-O-methoxyethylribose; note = backbone modification: 5'-phosphorothioate
  modified_base 6: mod_base = OTHER; note = backbone modification: 5'-phosphorothioate; note = thymine; note = sugar modification: 2'-O-methoxyethylribose
  modified_base 7: mod_base = OTHER; note = sugar modification: 2'-O-methoxyethylribose; note = backbone modification: 5'-phosphorothioate
  modified_base 8: mod_base = OTHER; mod_base = m5c; note = sugar modification: 2'-O-methoxyethylribose; note = backbone modification: 5'-phosphorothioate
  modified_base 9: mod_base = OTHER; note = thymine; note = backbone modification: 5'-phosphorothioate; note = sugar modification: 2'-O-methoxyethylribose
  modified_base 10: mod_base = OTHER; note = backbone modification: 5'-phosphorothioate; note = thymine; note = sugar modification: 2'-O-methoxyethylribose
  modified_base 11: mod_base = OTHER; mod_base = m5c; note = sugar modification: 2'-O-methoxyethylribose; note = backbone modification: 5'-phosphorothioate
  modified_base 12: mod_base = OTHER; note = sugar modification: 2'-O-methoxyethylribose; note = backbone modification: 5'-phosphorothioate
  modified_base 13: mod_base = OTHER; note = backbone modification: 5'-phosphorothioate; note = sugar modification: 2'-O-methoxyethylribose; note = thymine
  modified_base 14: mod_base = OTHER; note = backbone modification: 5'-phosphorothioate; note = thymine; note = sugar modification: 2'-O-methoxyethylribose
  modified_base 15: mod_base = OTHER; note = backbone modification: 5'-phosphorothioate; note = sugar modification: 2'-O-methoxyethylribose
  modified_base 16: mod_base = OTHER; note = backbone modification: 5'-phosphorothioate; note = thymine; note = sugar modification: 2'-O-methoxyethylribose
  modified_base 17: mod_base = OTHER; note = sugar modification: 2'-O-methoxyethylribose; note = backbone modification: 5'-phosphorothioate
  modified_base 18: mod_base = OTHER; note = backbone modification: 5'-phosphorothioate; note = sugar modification: 2'-O-methoxyethylribose; note = thymine
  modified_base 19: mod_base = OTHER; note = thymine; note = sugar modification: 2'-O-methoxyethylribose; note = backbone modification: 5'-phosphorothioate
  modified_base 20: mod_base = OTHER; note = backbone modification: 5'-phosphorothioate; note = sugar modification: 2'-O-methoxyethylribose
  modified_base 21: mod_base = OTHER; note = sugar modification: 2'-O-methoxyethylribose; note = backbone modification: 5'-phosphorothioate
  modified_base 22: mod_base = OTHER; note = backbone modification: 5'-phosphorothioate; note = sugar modification: 2'-O-methoxyethylribose
  modified_base 23: mod_base = OTHER; note = backbone modification: 5'-phosphorothioate; note = thymine; note = sugar modification: 2'-O-methoxyethylribose
  modified_base 24: mod_base = OTHER; mod_base = m5c; note = sugar modification: 2'-O-methoxyethylribose
tcttgtacttcattgtgttgaatc

SEQ ID NO: 663 - RNA, 24 nt, synthetic construct
  source 1..24: mol_type = other RNA; note = Antisense oligonucleotide
  modified_base 1: mod_base = OTHER; note = thymine; note = sugar modification: 2'-O-methoxyethylribose; note = backbone modification: 5'-phosphorothioate
  modified_base 2: mod_base = OTHER; mod_base = m5c; note = backbone modification: 5'-phosphorothioate; note = sugar modification: 2'-O-methoxyethylribose
  modified_base 3: mod_base = OTHER; note = sugar modification: 2'-O-methoxyethylribose; note = thymine; note = backbone modification: 5'-phosphorothioate
  modified_base 4: mod_base = OTHER; note = sugar modification: 2'-O-methoxyethylribose; note = thymine; note = backbone modification: 5'-phosphorothioate
  modified_base 5: mod_base = OTHER; note = backbone modification: 5'-phosphorothioate; note = sugar modification: 2'-O-methoxyethylribose
  modified_base 6: mod_base = OTHER; note = thymine; note = backbone modification: 5'-phosphorothioate; note = sugar modification: 2'-O-methoxyethylribose
  modified_base 7: mod_base = OTHER; note = backbone modification: 5'-phosphorothioate; note = sugar modification: 2'-O-methoxyethylribose
  modified_base 8: mod_base = m5c; mod_base = OTHER; note = backbone modification: 5'-phosphorothioate; note = sugar modification: 2'-O-methoxyethylribose
  modified_base 9: mod_base = OTHER; note = backbone modification: 5'-phosphorothioate; note = sugar modification: 2'-O-methoxyethylribose; note = thymine
  modified_base 10: mod_base = OTHER; note = thymine; note = backbone modification: 5'-phosphorothioate; note = sugar modification: 2'-O-methoxyethylribose
  modified_base 11: mod_base = m5c; mod_base = OTHER; note = sugar modification: 2'-O-methoxyethylribose; note = backbone modification: 5'-phosphorothioate
  modified_base 12: mod_base = OTHER; note = backbone modification: 5'-phosphorothioate; note = sugar modification: 2'-O-methoxyethylribose
  modified_base 13: mod_base = OTHER; note = backbone modification: 5'-phosphorothioate; note = sugar modification: 2'-O-methoxyethylribose
  modified_base 14: mod_base = OTHER; note = sugar modification: 2'-O-methoxyethylribose; note = thymine; note = backbone modification: 5'-phosphorothioate
  modified_base 15: mod_base = OTHER; note = backbone modification: 5'-phosphorothioate; note = thymine; note = sugar modification: 2'-O-methoxyethylribose
  modified_base 16: mod_base = OTHER; mod_base = m5c; note = sugar modification: 2'-O-methoxyethylribose; note = backbone modification: 5'-phosphorothioate
  modified_base 17: mod_base = OTHER; note = sugar modification: 2'-O-methoxyethylribose; note = backbone modification: 5'-phosphorothioate
  modified_base 18: mod_base = OTHER; note = sugar modification: 2'-O-methoxyethylribose; note = backbone modification: 5'-phosphorothioate
  modified_base 19: mod_base = OTHER; mod_base = m5c; note = backbone modification: 5'-phosphorothioate; note = sugar modification: 2'-O-methoxyethylribose
  modified_base 20: mod_base = OTHER; note = backbone modification: 5'-phosphorothioate; note = sugar modification: 2'-O-methoxyethylribose
  modified_base 21: mod_base = m5c; mod_base = OTHER; note = sugar modification: 2'-O-methoxyethylribose; note = backbone modification: 5'-phosphorothioate
  modified_base 22: mod_base = OTHER; note = sugar modification: 2'-O-methoxyethylribose; note = backbone modification: 5'-phosphorothioate
  modified_base 23: mod_base = OTHER; note = sugar modification: 2'-O-methoxyethylribose; note = backbone modification: 5'-phosphorothioate
  modified_base 24: mod_base = OTHER; note = sugar modification: 2'-O-methoxyethylribose; note = thymine
tcttgtacttcaattcaacacaat

SEQ ID NO: 664 - RNA, 24 nt, synthetic construct
  source 1..24: mol_type = other RNA; note = Antisense oligonucleotide
  modified_base 1: mod_base = OTHER; note = sugar modification: 2'-O-methoxyethylribose; note = backbone modification: 5'-phosphorothioate; note = thymine
  modified_base 2: mod_base = OTHER; note = thymine; note = backbone modification: 5'-phosphorothioate; note = sugar modification: 2'-O-methoxyethylribose
  modified_base 3: mod_base = m5c; mod_base = OTHER; note = sugar modification: 2'-O-methoxyethylribose; note = backbone modification: 5'-phosphorothioate
  modified_base 4: mod_base = OTHER; note = backbone modification: 5'-phosphorothioate; note = thymine; note = sugar modification: 2'-O-methoxyethylribose
  modified_base 5: mod_base = OTHER; note = thymine; note = sugar modification: 2'-O-methoxyethylribose; note = backbone modification: 5'-phosphorothioate
  modified_base 6: mod_base = OTHER; note = backbone modification: 5'-phosphorothioate; note = sugar modification: 2'-O-methoxyethylribose
  modified_base 7: mod_base = OTHER; note = thymine; note = backbone modification: 5'-phosphorothioate; note = sugar modification: 2'-O-methoxyethylribose
  modified_base 8: mod_base = OTHER; note = backbone modification: 5'-phosphorothioate; note = sugar modification: 2'-O-methoxyethylribose
  modified_base 9: mod_base = OTHER; mod_base = m5c; note = backbone modification: 5'-phosphorothioate; note = sugar modification: 2'-O-methoxyethylribose
  modified_base 10: mod_base = OTHER; note = thymine; note = sugar modification: 2'-O-methoxyethylribose; note = backbone modification: 5'-phosphorothioate
  modified_base 11: mod_base = OTHER; note = sugar modification: 2'-O-methoxyethylribose; note = backbone modification: 5'-phosphorothioate; note = thymine
  modified_base 12: mod_base = m5c; mod_base = OTHER; note = sugar modification: 2'-O-methoxyethylribose; note = backbone modification: 5'-phosphorothioate
  modified_base 13: mod_base = OTHER; note = thymine; note = backbone modification: 5'-phosphorothioate; note = sugar modification: 2'-O-methoxyethylribose
  modified_base 14: mod_base = OTHER; note = backbone modification: 5'-phosphorothioate; note = sugar modification: 2'-O-methoxyethylribose
  modified_base 15: mod_base = OTHER; note = sugar modification: 2'-O-methoxyethylribose; note = thymine; note = backbone modification: 5'-phosphorothioate
  modified_base 16: mod_base = OTHER; note = backbone modification: 5'-phosphorothioate; note = sugar modification: 2'-O-methoxyethylribose
  modified_base 17: mod_base = OTHER; note = backbone modification: 5'-phosphorothioate; note = thymine; note = sugar modification: 2'-O-methoxyethylribose
  modified_base 18: mod_base = OTHER; note = thymine; note = sugar modification: 2'-O-methoxyethylribose; note = backbone modification: 5'-phosphorothioate
  modified_base 19: mod_base = OTHER; note = backbone modification: 5'-phosphorothioate; note = sugar modification: 2'-O-methoxyethylribose
  modified_base 20: mod_base = OTHER; note = backbone modification: 5'-phosphorothioate; note = sugar modification: 2'-O-methoxyethylribose
  modified_base 21: mod_base = OTHER; note = sugar modification: 2'-O-methoxyethylribose; note = backbone modification: 5'-phosphorothioate
  modified_base 22: mod_base = OTHER; note = sugar modification: 2'-O-methoxyethylribose; note = backbone modification: 5'-phosphorothioate; note = thymine
  modified_base 23: mod_base = OTHER; mod_base = m5c; note = backbone modification: 5'-phosphorothioate; note = sugar modification: 2'-O-methoxyethylribose
  modified_base 24: mod_base = m5c; mod_base = OTHER; note = sugar modification: 2'-O-methoxyethylribose
ttcttgtacttctgtgttgaatcc

SEQ ID NO: 665 - RNA, 24 nt, synthetic construct
  source 1..24: mol_type = other RNA; note = Antisense oligonucleotide
  modified_base 1: mod_base = OTHER; note = sugar modification: 2'-O-methoxyethylribose; note = thymine; note = backbone modification: 5'-phosphorothioate
  modified_base 2: mod_base = OTHER; note = thymine; note = sugar modification: 2'-O-methoxyethylribose; note = backbone modification: 5'-phosphorothioate
  modified_base 3: mod_base = OTHER; mod_base = m5c; note = sugar modification: 2'-O-methoxyethylribose; note = backbone modification: 5'-phosphorothioate
  modified_base 4: mod_base = OTHER; note = backbone modification: 5'-phosphorothioate; note = sugar modification: 2'-O-methoxyethylribose; note = thymine
  modified_base 5: mod_base = OTHER; note = sugar modification: 2'-O-methoxyethylribose; note = backbone modification: 5'-phosphorothioate; note = thymine
  modified_base 6: mod_base = OTHER; note = backbone modification: 5'-phosphorothioate; note = sugar modification: 2'-O-methoxyethylribose
  modified_base 7: mod_base = OTHER; note = backbone modification: 5'-phosphorothioate; note = sugar modification: 2'-O-methoxyethylribose; note = thymine
  modified_base 8: mod_base = OTHER; note = backbone modification: 5'-phosphorothioate; note = sugar modification: 2'-O-methoxyethylribose
  modified_base 9: mod_base = m5c; mod_base = OTHER; note = backbone modification: 5'-phosphorothioate; note = sugar modification: 2'-O-methoxyethylribose
  modified_base 10: mod_base = OTHER; note = sugar modification: 2'-O-methoxyethylribose; note = backbone modification: 5'-phosphorothioate; note = thymine
  modified_base 11: mod_base = OTHER; note = thymine; note = sugar modification: 2'-O-methoxyethylribose; note = backbone modification: 5'-phosphorothioate
  modified_base 12: mod_base = OTHER; mod_base = m5c; note = sugar modification: 2'-O-methoxyethylribose; note = backbone modification: 5'-phosphorothioate
  modified_base 13: mod_base = OTHER; note = thymine; note = backbone modification: 5'-phosphorothioate; note = sugar modification: 2'-O-methoxyethylribose
  modified_base 14: mod_base = OTHER; note = backbone modification: 5'-phosphorothioate; note = thymine; note = sugar modification: 2'-O-methoxyethylribose
  modified_base 15: mod_base = OTHER; note = sugar modification: 2'-O-methoxyethylribose; note = backbone modification: 5'-phosphorothioate
  modified_base 16: mod_base = OTHER; note = sugar modification: 2'-O-methoxyethylribose; note = thymine; note = backbone modification: 5'-phosphorothioate
  modified_base 17: mod_base = OTHER; note = backbone modification: 5'-phosphorothioate; note = sugar modification: 2'-O-methoxyethylribose
  modified_base 18: mod_base = OTHER; note = backbone modification: 5'-phosphorothioate; note = thymine; note = sugar modification: 2'-O-methoxyethylribose
  modified_base 19: mod_base = OTHER; note = sugar modification: 2'-O-methoxyethylribose; note = thymine; note = backbone modification: 5'-phosphorothioate
  modified_base 20: mod_base = OTHER; note = sugar modification: 2'-O-methoxyethylribose; note = backbone modification: 5'-phosphorothioate
  modified_base 21: mod_base = OTHER; note = backbone modification: 5'-phosphorothioate; note = sugar modification: 2'-O-methoxyethylribose
  modified_base 22: mod_base = OTHER; note = backbone modification: 5'-phosphorothioate; note = sugar modification: 2'-O-methoxyethylribose
  modified_base 23: mod_base = OTHER; note = backbone modification: 5'-phosphorothioate; note = sugar modification: 2'-O-methoxyethylribose; note = thymine
  modified_base 24: mod_base = OTHER; mod_base = m5c; note = sugar modification: 2'-O-methoxyethylribose
ttcttgtacttcttgtgttgaatc

SEQ ID NO: 666 - RNA, 24 nt, synthetic construct
  source 1..24: mol_type = other RNA; note = Antisense oligonucleotide
  modified_base 1: mod_base = OTHER; note = thymine; note = sugar modification: 2'-O-methoxyethylribose; note = backbone modification: 5'-phosphorothioate
  modified_base 2: mod_base = OTHER; note = thymine; note = sugar modification: 2'-O-methoxyethylribose; note = backbone modification: 5'-phosphorothioate
  modified_base 3: mod_base = m5c; mod_base = OTHER; note = backbone modification: 5'-phosphorothioate; note = sugar modification: 2'-O-methoxyethylribose
  modified_base 4: mod_base = OTHER; note = sugar modification: 2'-O-methoxyethylribose; note = thymine; note = backbone modification: 5'-phosphorothioate
  modified_base 5: mod_base = OTHER; note = sugar modification: 2'-O-methoxyethylribose; note = backbone modification: 5'-phosphorothioate; note = thymine
  modified_base 6: mod_base = OTHER; note = sugar modification: 2'-O-methoxyethylribose; note = backbone modification: 5'-phosphorothioate
  modified_base 7: mod_base = OTHER; note = backbone modification: 5'-phosphorothioate; note = sugar modification: 2'-O-methoxyethylribose; note = thymine
  modified_base 8: mod_base = OTHER; note = sugar modification: 2'-O-methoxyethylribose; note = backbone modification: 5'-phosphorothioate
  modified_base 9: mod_base = m5c; mod_base = OTHER; note = sugar modification: 2'-O-methoxyethylribose; note = backbone modification: 5'-phosphorothioate
  modified_base 10: mod_base = OTHER; note = thymine; note = backbone modification: 5'-phosphorothioate; note = sugar modification: 2'-O-methoxyethylribose
  modified_base 11: mod_base = OTHER; note = backbone modification: 5'-phosphorothioate; note = thymine; note = sugar modification: 2'-O-methoxyethylribose
  modified_base 12: mod_base = m5c; mod_base = OTHER; note = backbone modification: 5'-phosphorothioate; note = sugar modification: 2'-O-methoxyethylribose
  modified_base 13: mod_base = OTHER; note = backbone modification: 5'-phosphorothioate; note = sugar modification: 2'-O-methoxyethylribose
  modified_base 14: mod_base = OTHER; note = sugar modification: 2'-O-methoxyethylribose; note = thymine; note = backbone modification: 5'-phosphorothioate
  modified_base 15: mod_base = OTHER; note = thymine; note = sugar modification: 2'-O-methoxyethylribose; note = backbone modification: 5'-phosphorothioate
  modified_base 16: mod_base = OTHER; mod_base = m5c; note = backbone modification: 5'-phosphorothioate; note = sugar modification: 2'-O-methoxyethylribose
  modified_base 17: mod_base = OTHER; note = sugar modification: 2'-O-methoxyethylribose; note = backbone modification: 5'-phosphorothioate
  modified_base 18: mod_base = OTHER; note = sugar modification: 2'-O-methoxyethylribose; note = backbone modification: 5'-phosphorothioate
  modified_base 19: mod_base = OTHER; mod_base = m5c; note = backbone modification: 5'-phosphorothioate; note = sugar modification: 2'-O-methoxyethylribose
  modified_base 20: mod_base = OTHER; note = sugar modification: 2'-O-methoxyethylribose; note = backbone modification: 5'-phosphorothioate
  modified_base 21: mod_base = m5c; mod_base = OTHER; note = backbone modification: 5'-phosphorothioate; note = sugar modification: 2'-O-methoxyethylribose
  modified_base 22: mod_base = OTHER; note = sugar modification: 2'-O-methoxyethylribose; note = backbone modification: 5'-phosphorothioate
  modified_base 23: mod_base = OTHER; note = backbone modification: 5'-phosphorothioate; note = sugar modification: 2'-O-methoxyethylribose
  modified_base 24: mod_base = OTHER; note = sugar modification: 2'-O-methoxyethylribose; note = thymine
ttcttgtacttcattcaacacaat

SEQ ID NO: 667 - RNA, 24 nt, synthetic construct
  source 1..24: mol_type = other RNA; note = Antisense oligonucleotide
  modified_base 1: mod_base = OTHER; note = backbone modification: 5'-phosphorothioate; note = sugar modification: 2'-O-methoxyethylribose
  modified_base 2: mod_base = OTHER; note = sugar modification: 2'-O-methoxyethylribose; note = thymine; note = backbone modification: 5'-phosphorothioate
  modified_base 3: mod_base = OTHER; note = thymine; note = sugar modification: 2'-O-methoxyethylribose; note = backbone modification: 5'-phosphorothioate
  modified_base 4: mod_base = m5c; mod_base = OTHER; note = sugar modification: 2'-O-methoxyethylribose; note = backbone modification: 5'-phosphorothioate
  modified_base 5: mod_base = OTHER; note = sugar modification: 2'-O-methoxyethylribose; note = thymine; note = backbone modification: 5'-phosphorothioate
  modified_base 6: mod_base = OTHER; note = sugar modification: 2'-O-methoxyethylribose; note = thymine; note = backbone modification: 5'-phosphorothioate
  modified_base 7: mod_base = OTHER; note = backbone modification: 5'-phosphorothioate; note = sugar modification: 2'-O-methoxyethylribose
  modified_base 8: mod_base = OTHER; note = sugar modification: 2'-O-methoxyethylribose; note = backbone modification: 5'-phosphorothioate; note = thymine
  modified_base 9: mod_base = OTHER; note = sugar modification: 2'-O-methoxyethylribose; note = backbone modification: 5'-phosphorothioate
  modified_base 10: mod_base = m5c; mod_base = OTHER; note = backbone modification: 5'-phosphorothioate; note = sugar modification: 2'-O-methoxyethylribose
  modified_base 11: mod_base = OTHER; note = thymine; note = sugar modification: 2'-O-methoxyethylribose; note = backbone modification: 5'-phosphorothioate
  modified_base 12: mod_base = OTHER; note = backbone modification: 5'-phosphorothioate; note = sugar modification: 2'-O-methoxyethylribose; note = thymine
  modified_base 13: mod_base = OTHER; note = backbone modification: 5'-phosphorothioate; note = thymine; note = sugar modification: 2'-O-methoxyethylribose
  modified_base 14: mod_base = OTHER; note = sugar modification: 2'-O-methoxyethylribose; note = backbone modification: 5'-phosphorothioate
  modified_base 15: mod_base = OTHER; note = backbone modification: 5'-phosphorothioate; note = thymine; note = sugar modification: 2'-O-methoxyethylribose
  modified_base 16: mod_base = OTHER; note = sugar modification: 2'-O-methoxyethylribose; note = backbone modification: 5'-phosphorothioate
  modified_base 17: mod_base = OTHER; note = backbone modification: 5'-phosphorothioate; note = thymine; note = sugar modification: 2'-O-methoxyethylribose
  modified_base 18: mod_base = OTHER; note = thymine; note = backbone modification: 5'-phosphorothioate; note = sugar modification: 2'-O-methoxyethylribose
  modified_base 19: mod_base = OTHER; note = sugar modification: 2'-O-methoxyethylribose; note = backbone modification: 5'-phosphorothioate
  modified_base 20: mod_base = OTHER; note = sugar modification: 2'-O-methoxyethylribose; note = backbone modification: 5'-phosphorothioate
  modified_base 21: mod_base = OTHER; note = backbone modification: 5'-phosphorothioate; note = sugar modification: 2'-O-methoxyethylribose
  modified_base 22: mod_base = OTHER; note = sugar modification: 2'-O-methoxyethylribose; note = backbone modification: 5'-phosphorothioate; note = thymine
  modified_base 23: mod_base = OTHER; mod_base = m5c; note = sugar modification: 2'-O-methoxyethylribose; note = backbone modification: 5'-phosphorothioate
  modified_base 24: mod_base = OTHER; mod_base = m5c; note = sugar modification: 2'-O-methoxyethylribose
gttcttgtactttgtgttgaatcc

SEQ ID NO: 668 - RNA, 24 nt, synthetic construct
  source 1..24: mol_type = other RNA; note = Antisense oligonucleotide
  modified_base 1: mod_base = OTHER; note = backbone modification: 5'-phosphorothioate; note = sugar modification: 2'-O-methoxyethylribose
  modified_base 2: mod_base = OTHER; note = thymine; note = sugar modification: 2'-O-methoxyethylribose; note = backbone modification: 5'-phosphorothioate
  modified_base 3: mod_base = OTHER; note = thymine; note = backbone modification: 5'-phosphorothioate; note = sugar modification: 2'-O-methoxyethylribose
  modified_base 4: mod_base = m5c; mod_base = OTHER; note = sugar modification: 2'-O-methoxyethylribose; note = backbone modification: 5'-phosphorothioate
  modified_base 5: mod_base = OTHER; note = thymine; note = backbone modification: 5'-phosphorothioate; note = sugar modification: 2'-O-methoxyethylribose
  modified_base 6: mod_base = OTHER; note = thymine; note = sugar modification: 2'-O-methoxyethylribose; note = backbone modification: 5'-phosphorothioate
  modified_base 7: mod_base = OTHER; note = backbone modification: 5'-phosphorothioate; note = sugar modification: 2'-O-methoxyethylribose
  modified_base 8: mod_base = OTHER; note = sugar modification: 2'-O-methoxyethylribose; note = thymine; note = backbone modification: 5'-phosphorothioate
  modified_base 9: mod_base = OTHER; note = backbone modification: 5'-phosphorothioate; note = sugar modification: 2'-O-methoxyethylribose
  modified_base 10: mod_base = OTHER; mod_base = m5c; note = sugar modification: 2'-O-methoxyethylribose; note = backbone modification: 5'-phosphorothioate
  modified_base 11: mod_base = OTHER; note = sugar modification: 2'-O-methoxyethylribose; note = backbone modification: 5'-phosphorothioate; note = thymine
  modified_base 12: mod_base = OTHER; note = sugar modification: 2'-O-methoxyethylribose; note = backbone modification: 5'-phosphorothioate; note = thymine
  modified_base 13: mod_base = OTHER; note = thymine; note = sugar modification: 2'-O-methoxyethylribose; note = backbone modification: 5'-phosphorothioate
  modified_base 14: mod_base = OTHER; note = sugar modification: 2'-O-methoxyethylribose; note = backbone modification: 5'-phosphorothioate; note = thymine
  modified_base 15: mod_base = OTHER; note = backbone modification: 5'-phosphorothioate; note = sugar modification: 2'-O-methoxyethylribose
  modified_base 16: mod_base = OTHER; note = backbone modification: 5'-phosphorothioate; note = thymine; note = sugar modification: 2'-O-methoxyethylribose
  modified_base 17: mod_base = OTHER; note = sugar modification: 2'-O-methoxyethylribose; note = backbone modification: 5'-phosphorothioate
  modified_base 18: mod_base = OTHER; note = thymine; note = backbone modification: 5'-phosphorothioate; note = sugar modification: 2'-O-methoxyethylribose
  modified_base 19: mod_base = OTHER; note = backbone modification: 5'-phosphorothioate; note = thymine; note = sugar modification: 2'-O-methoxyethylribose
  modified_base 20: mod_base = OTHER; note = backbone modification: 5'-phosphorothioate; note = sugar modification: 2'-O-methoxyethylribose
  modified_base 21: mod_base = OTHER; note = sugar modification: 2'-O-methoxyethylribose; note = backbone modification: 5'-phosphorothioate
  modified_base 22: mod_base = OTHER; note = backbone modification: 5'-phosphorothioate; note = sugar modification: 2'-O-methoxyethylribose
  modified_base 23: mod_base = OTHER; note = thymine; note = sugar modification: 2'-O-methoxyethylribose; note = backbone modification: 5'-phosphorothioate
  modified_base 24: mod_base = OTHER; mod_base = m5c; note = sugar modification: 2'-O-methoxyethylribose
gttcttgtacttttgtgttgaatc

SEQ ID NO: 669 - RNA, 24 nt, synthetic construct
  source 1..24: mol_type = other RNA; note = Antisense oligonucleotide
  modified_base 1: mod_base = OTHER; note = backbone modification: 5'-phosphorothioate; note = sugar modification: 2'-O-methoxyethylribose
  modified_base 2: mod_base = OTHER; note = backbone modification: 5'-phosphorothioate; note = thymine; note = sugar modification: 2'-O-methoxyethylribose
  modified_base 3: mod_base = OTHER; note = backbone modification: 5'-phosphorothioate; note = thymine; note = sugar modification: 2'-O-methoxyethylribose
  modified_base 4: mod_base = m5c; mod_base = OTHER; note = sugar modification: 2'-O-methoxyethylribose; note = backbone modification: 5'-phosphorothioate
  modified_base 5: mod_base = OTHER; note = backbone modification: 5'-phosphorothioate; note = sugar modification: 2'-O-methoxyethylribose; note = thymine
  modified_base 6: mod_base = OTHER; note = sugar modification: 2'-O-methoxyethylribose; note = backbone modification: 5'-phosphorothioate; note = thymine
  modified_base 7: mod_base = OTHER; note = backbone modification: 5'-phosphorothioate; note = sugar modification: 2'-O-methoxyethylribose
  modified_base 8: mod_base = OTHER; note = backbone modification: 5'-phosphorothioate; note = sugar modification: 2'-O-methoxyethylribose; note = thymine
  modified_base 9: mod_base = OTHER; note = backbone modification: 5'-phosphorothioate; note = sugar modification: 2'-O-methoxyethylribose
  modified_base 10: mod_base = OTHER; mod_base = m5c; note = backbone modification: 5'-phosphorothioate; note = sugar modification: 2'-O-methoxyethylribose
  modified_base 11: mod_base = OTHER; note = sugar modification: 2'-O-methoxyethylribose; note = backbone modification: 5'-phosphorothioate; note = thymine
  modified_base 12: mod_base = OTHER; note = backbone modification: 5'-phosphorothioate; note = thymine; note = sugar modification: 2'-O-methoxyethylribose
  modified_base 13: mod_base = OTHER; note = sugar modification: 2'-O-methoxyethylribose; note = backbone modification: 5'-phosphorothioate
  modified_base 14: mod_base = OTHER; note = sugar modification: 2'-O-methoxyethylribose; note = thymine; note = backbone modification: 5'-phosphorothioate
  modified_base 15: mod_base = OTHER; note = backbone modification: 5'-phosphorothioate; note = sugar modification: 2'-O-methoxyethylribose; note = thymine
  modified_base 16: mod_base = OTHER; mod_base = m5c; note = backbone modification: 5'-phosphorothioate; note = sugar modification: 2'-O-methoxyethylribose
  modified_base 17: mod_base = OTHER; note = sugar modification: 2'-O-methoxyethylribose; note = backbone modification: 5'-phosphorothioate
  modified_base 18: mod_base = OTHER; note = backbone modification: 5'-phosphorothioate; note = sugar modification: 2'-O-methoxyethylribose
  modified_base 19: mod_base = m5c; mod_base = OTHER; note = backbone modification: 5'-phosphorothioate; note = sugar modification: 2'-O-methoxyethylribose
  modified_base 20: mod_base = OTHER; note = sugar modification: 2'-O-methoxyethylribose; note = backbone modification: 5'-phosphorothioate
  modified_base 21: mod_base = m5c; mod_base = OTHER; note = sugar modification: 2'-O-methoxyethylribose; note = backbone modification: 5'-phosphorothioate
  modified_base 22: mod_base = OTHER; note = backbone modification: 5'-phosphorothioate; note = sugar modification: 2'-O-methoxyethylribose
  modified_base 23: mod_base = OTHER; note = backbone modification: 5'-phosphorothioate; note = sugar modification: 2'-O-methoxyethylribose
  modified_base 24: mod_base = OTHER; note = sugar modification: 2'-O-methoxyethylribose; note = thymine
gttcttgtacttattcaacacaat

SEQ ID NO: 670 - RNA, 24 nt, synthetic construct
  source 1..24: mol_type = other RNA; note = Antisense oligonucleotide
  modified_base 1: mod_base = OTHER; note = backbone modification: 5'-phosphorothioate; note = thymine; note = sugar modification: 2'-O-methoxyethylribose
  modified_base 2: mod_base = OTHER; note = backbone modification: 5'-phosphorothioate; note = sugar modification: 2'-O-methoxyethylribose
  modified_base 3: mod_base = OTHER; note = thymine; note = backbone modification: 5'-phosphorothioate; note = sugar modification: 2'-O-methoxyethylribose
  modified_base 4: mod_base = OTHER; note = sugar modification: 2'-O-methoxyethylribose; note = backbone modification: 5'-phosphorothioate
  modified_base 5: mod_base = OTHER; note = thymine; note = backbone modification: 5'-phosphorothioate; note = sugar modification: 2'-O-methoxyethylribose
  modified_base 6: mod_base = OTHER; note = sugar modification: 2'-O-methoxyethylribose; note = backbone modification: 5'-phosphorothioate; note = thymine
  modified_base 7: mod_base = OTHER; note = backbone modification: 5'-phosphorothioate; note = sugar modification: 2'-O-methoxyethylribose
  modified_base 8: mod_base = OTHER; note = sugar modification: 2'-O-methoxyethylribose; note = backbone modification: 5'-phosphorothioate
  modified_base 9: mod_base = OTHER; note = backbone modification: 5'-phosphorothioate; note = sugar modification: 2'-O-methoxyethylribose
  modified_base 10: mod_base = OTHER; note = backbone modification: 5'-phosphorothioate; note = thymine; note = sugar modification: 2'-O-methoxyethylribose
  modified_base 11: mod_base = m5c; mod_base = OTHER; note = backbone modification: 5'-phosphorothioate; note = sugar modification: 2'-O-methoxyethylribose
  modified_base 12: mod_base = m5c; mod_base = OTHER; note = backbone modification: 5'-phosphorothioate; note = sugar modification: 2'-O-methoxyethylribose
  modified_base 13: mod_base = OTHER; note = thymine; note = sugar modification: 2'-O-methoxyethylribose; note = backbone modification: 5'-phosphorothioate
  modified_base 14: mod_base = OTHER; mod_base = m5c; note = sugar modification: 2'-O-methoxyethylribose; note = backbone modification: 5'-phosphorothioate
  modified_base 15: mod_base = OTHER; note = backbone modification: 5'-phosphorothioate; note = sugar modification: 2'-O-methoxyethylribose; note = thymine
  modified_base 16: mod_base = OTHER; note = sugar modification: 2'-O-methoxyethylribose; note = backbone modification: 5'-phosphorothioate; note = thymine
  modified_base 17: mod_base = OTHER; note = backbone modification: 5'-phosphorothioate; note = sugar modification: 2'-O-methoxyethylribose
  modified_base 18: mod_base = OTHER; note = sugar modification: 2'-O-methoxyethylribose; note = thymine; note = backbone modification: 5'-phosphorothioate
  modified_base 19: mod_base = OTHER; note = sugar modification: 2'-O-methoxyethylribose; note = backbone modification: 5'-phosphorothioate
  modified_base 20: mod_base = m5c; mod_base = OTHER; note = sugar modification: 2'-O-methoxyethylribose; note = backbone modification: 5'-phosphorothioate
  modified_base 21: mod_base = OTHER; note = sugar modification: 2'-O-methoxyethylribose; note = backbone modification: 5'-phosphorothioate; note = thymine
  modified_base 22: mod_base = OTHER; note = sugar modification: 2'-O-methoxyethylribose; note = backbone modification: 5'-phosphorothioate; note = thymine
  modified_base 23: mod_base = m5c; mod_base = OTHER; note = sugar modification: 2'-O-methoxyethylribose; note = backbone modification: 5'-phosphorothioate
  modified_base 24: mod_base = OTHER; note = sugar modification: 2'-O-methoxyethylribose
tgtgttgaatcctcttgtacttca

SEQ ID NO: 671 - RNA, 24 nt, synthetic construct
  source 1..24: mol_type = other RNA; note = Antisense oligonucleotide
  modified_base 1: mod_base = OTHER; note = backbone modification: 5'-phosphorothioate; note = thymine; note = sugar modification: 2'-O-methoxyethylribose
  modified_base 2: mod_base = OTHER; note = sugar modification: 2'-O-methoxyethylribose; note = backbone modification: 5'-phosphorothioate
  modified_base 3: mod_base = OTHER; note = thymine; note = sugar modification: 2'-O-methoxyethylribose; note = backbone modification: 5'-phosphorothioate
  modified_base 4: mod_base = OTHER; note = backbone modification: 5'-phosphorothioate; note = sugar modification: 2'-O-methoxyethylribose
  modified_base 5: mod_base = OTHER; note = sugar modification: 2'-O-methoxyethylribose; note = backbone modification: 5'-phosphorothioate; note = thymine
  modified_base 6: mod_base = OTHER; note = sugar modification: 2'-O-methoxyethylribose; note = backbone modification: 5'-phosphorothioate; note = thymine
  modified_base 7: mod_base = OTHER; note = backbone modification: 5'-phosphorothioate; note = sugar modification: 2'-O-methoxyethylribose
  modified_base 8: mod_base = OTHER; note = sugar modification: 2'-O-methoxyethylribose; note = backbone modification: 5'-phosphorothioate
  modified_base 9: mod_base = OTHER; note = backbone modification: 5'-phosphorothioate; note = sugar modification: 2'-O-methoxyethylribose
  modified_base 10: mod_base = OTHER; note = thymine; note = sugar modification: 2'-O-methoxyethylribose; note = backbone modification: 5'-phosphorothioate
  modified_base 11: mod_base = OTHER; mod_base = m5c; note = sugar modification: 2'-O-methoxyethylribose; note = backbone modification: 5'-phosphorothioate
  modified_base 12: mod_base = m5c; mod_base = OTHER; note = sugar modification: 2'-O-methoxyethylribose; note = backbone modification: 5'-phosphorothioate
  modified_base 13: mod_base = OTHER; note = backbone modification: 5'-phosphorothioate; note = sugar modification: 2'-O-methoxyethylribose; note = thymine
  modified_base 14: mod_base = OTHER; note = thymine; note = sugar modification: 2'-O-methoxyethylribose; note = backbone modification: 5'-phosphorothioate
  modified_base 15: mod_base = m5c; mod_base = OTHER; note = sugar modification: 2'-O-methoxyethylribose; note = backbone modification: 5'-phosphorothioate
  modified_base 16: mod_base = OTHER; note = backbone modification: 5'-phosphorothioate; note = thymine; note = sugar modification: 2'-O-methoxyethylribose
  modified_base 17: mod_base = OTHER; note = sugar modification: 2'-O-methoxyethylribose; note = thymine; note = backbone modification: 5'-phosphorothioate
  modified_base 18: mod_base = OTHER; note = sugar modification: 2'-O-methoxyethylribose; note = backbone modification: 5'-phosphorothioate
  modified_base 19: mod_base = OTHER; note = backbone modification: 5'-phosphorothioate; note = sugar modification: 2'-O-methoxyethylribose; note = thymine
  modified_base 20: mod_base = OTHER; note = backbone modification: 5'-phosphorothioate; note = sugar modification: 2'-O-methoxyethylribose
  modified_base 21: mod_base = OTHER; mod_base = m5c; note = backbone modification: 5'-phosphorothioate; note = sugar modification: 2'-O-methoxyethylribose
  modified_base 22: mod_base = OTHER; note = backbone modification: 5'-phosphorothioate; note = thymine; note = sugar modification: 2'-O-methoxyethylribose
  modified_base 23: mod_base = OTHER; note = sugar modification: 2'-O-methoxyethylribose; note = thymine; note = backbone modification: 5'-phosphorothioate
  modified_base 24: mod_base = m5c; mod_base = OTHER; note = sugar modification: 2'-O-methoxyethylribose
tgtgttgaatccttcttgtacttc

SEQ ID NO: 672 - RNA, 24 nt, synthetic construct
  source 1..24: mol_type = other RNA; note = Antisense oligonucleotide
  modified_base 1: mod_base = OTHER; note = thymine; note = sugar modification: 2'-O-methoxyethylribose; note = backbone modification: 5'-phosphorothioate
  modified_base 2: mod_base = OTHER; note = sugar modification: 2'-O-methoxyethylribose; note = backbone modification: 5'-phosphorothioate
  modified_base 3: mod_base = OTHER; note = backbone modification: 5'-phosphorothioate; note = sugar modification: 2'-O-methoxyethylribose; note = thymine
  modified_base 4: mod_base = OTHER; note = backbone modification: 5'-phosphorothioate; note = sugar modification: 2'-O-methoxyethylribose
  modified_base 5: mod_base = OTHER; note = thymine; note = backbone modification: 5'-phosphorothioate; note = sugar modification: 2'-O-methoxyethylribose
  modified_base 6: mod_base = OTHER; note = backbone modification: 5'-phosphorothioate; note = sugar modification: 2'-O-methoxyethylribose; note = thymine
  modified_base 7: mod_base = OTHER; note = sugar modification: 2'-O-methoxyethylribose; note = backbone modification: 5'-phosphorothioate
  modified_base 8: mod_base = OTHER; note = sugar modification: 2'-O-methoxyethylribose; note = backbone modification: 5'-phosphorothioate
  modified_base 9: mod_base = OTHER; note = sugar modification: 2'-O-methoxyethylribose; note = backbone modification: 5'-phosphorothioate
  modified_base 10: mod_base = OTHER; note = backbone modification: 5'-phosphorothioate; note = sugar modification: 2'-O-methoxyethylribose; note = thymine
  modified_base 11: mod_base = OTHER; mod_base = m5c; note = backbone modification: 5'-phosphorothioate; note = sugar modification: 2'-O-methoxyethylribose
  modified_base 12: mod_base = m5c; mod_base = OTHER; note = backbone modification: 5'-phosphorothioate; note = sugar modification: 2'-O-methoxyethylribose
  modified_base 13: mod_base = OTHER; note = backbone modification: 5'-phosphorothioate; note = sugar modification: 2'-O-methoxyethylribose
  modified_base 14: mod_base = OTHER; note = backbone modification: 5'-phosphorothioate; note = thymine; note = sugar modification: 2'-O-methoxyethylribose
  modified_base 15: mod_base = OTHER; note = sugar modification: 2'-O-methoxyethylribose; note = backbone modification: 5'-phosphorothioate; note = thymine
  modified_base 16: mod_base = m5c; mod_base = OTHER; note = sugar modification: 2'-O-methoxyethylribose; note = backbone modification: 5'-phosphorothioate
  modified_base 17: mod_base = OTHER; note = backbone modification: 5'-phosphorothioate; note = sugar modification: 2'-O-methoxyethylribose; note = thymine
  modified_base 18: mod_base = OTHER; note = thymine; note = sugar modification: 2'-O-methoxyethylribose; note = backbone modification: 5'-phosphorothioate
  modified_base 19: mod_base = OTHER; note = sugar modification: 2'-O-methoxyethylribose; note = backbone modification: 5'-phosphorothioate
  modified_base 20: mod_base = OTHER; note = backbone modification: 5'-phosphorothioate; note = thymine; note = sugar modification: 2'-O-methoxyethylribose
  modified_base 21: mod_base = OTHER; note = sugar modification: 2'-O-methoxyethylribose; note = backbone modification: 5'-phosphorothioate
  modified_base 22: mod_base = OTHER; mod_base = m5c; note = sugar modification: 2'-O-methoxyethylribose; note = backbone modification: 5'-phosphorothioate
  modified_base 23: mod_base = OTHER; note = thymine; note = backbone modification: 5'-phosphorothioate; note = sugar modification: 2'-O-methoxyethylribose
  modified_base 24: mod_base = OTHER; note = thymine; note = sugar modification: 2'-O-methoxyethylribose
tgtgttgaatccgttcttgtactt

SEQ ID NO: 673 - RNA, 24 nt, synthetic construct
  source 1..24: mol_type = other RNA; note = Antisense oligonucleotide
  modified_base 1: mod_base = OTHER; note = thymine; note = sugar modification: 2'-O-methoxyethylribose; note = backbone modification: 5'-phosphorothioate
  modified_base 2: mod_base = OTHER; note = backbone modification: 5'-phosphorothioate; note = thymine; note = sugar modification: 2'-O-methoxyethylribose
  modified_base 3: mod_base = OTHER; note = sugar modification: 2'-O-methoxyethylribose; note = backbone modification: 5'-phosphorothioate
  modified_base 4: mod_base = OTHER; note = thymine; note = backbone modification: 5'-phosphorothioate; note = sugar modification: 2'-O-methoxyethylribose
  modified_base 5: mod_base = OTHER; note = backbone modification: 5'-phosphorothioate; note = sugar modification: 2'-O-methoxyethylribose
  modified_base 6: mod_base = OTHER; note = backbone modification: 5'-phosphorothioate; note = sugar modification: 2'-O-methoxyethylribose; note = thymine
  modified_base 7: mod_base = OTHER; note = sugar modification: 2'-O-methoxyethylribose; note = thymine; note = backbone modification: 5'-phosphorothioate
  modified_base 8: mod_base = OTHER; note = sugar modification: 2'-O-methoxyethylribose; note = backbone modification: 5'-phosphorothioate
  modified_base 9: mod_base = OTHER; note = sugar modification: 2'-O-methoxyethylribose; note = backbone modification: 5'-phosphorothioate
  modified_base 10: mod_base = OTHER; note = backbone modification: 5'-phosphorothioate; note = sugar modification: 2'-O-methoxyethylribose
  modified_base 11: mod_base = OTHER; note = thymine; note = backbone modification: 5'-phosphorothioate; note = sugar modification: 2'-O-methoxyethylribose
  modified_base 12: mod_base = m5c; mod_base = OTHER; note = backbone modification: 5'-phosphorothioate; note = sugar modification: 2'-O-methoxyethylribose
  modified_base 13: mod_base = OTHER; note = sugar modification: 2'-O-methoxyethylribose; note = backbone modification: 5'-phosphorothioate; note = thymine
  modified_base 14: mod_base = m5c; mod_base = OTHER; note = sugar modification: 2'-O-methoxyethylribose; note = backbone modification: 5'-phosphorothioate
  modified_base 15: mod_base = OTHER; note = thymine; note = sugar modification: 2'-O-methoxyethylribose; note = backbone modification: 5'-phosphorothioate
  modified_base 16: mod_base = OTHER; note = sugar modification: 2'-O-methoxyethylribose; note = thymine; note = backbone modification: 5'-phosphorothioate
  modified_base 17: mod_base = OTHER; note = backbone modification: 5'-phosphorothioate; note = sugar modification: 2'-O-methoxyethylribose
  modified_base 18: mod_base = OTHER; note = thymine; note = sugar modification: 2'-O-methoxyethylribose; note = backbone modification: 5'-phosphorothioate
  modified_base 19: mod_base = OTHER; note = sugar modification: 2'-O-methoxyethylribose; note = backbone modification: 5'-phosphorothioate
  modified_base 20: mod_base = OTHER; mod_base = m5c; note = backbone modification: 5'-phosphorothioate; note = sugar modification: 2'-O-methoxyethylribose
  modified_base 21: mod_base = OTHER; note = thymine; note = sugar modification: 2'-O-methoxyethylribose; note = backbone modification: 5'-phosphorothioate
  modified_base 22: mod_base = OTHER; note = sugar modification: 2'-O-methoxyethylribose; note = thymine; note = backbone modification: 5'-phosphorothioate
  modified_base 23: mod_base = OTHER; mod_base = m5c; note = sugar modification: 2'-O-methoxyethylribose; note = backbone modification: 5'-phosphorothioate
  modified_base 24: mod_base = OTHER; note = sugar modification: 2'-O-methoxyethylribose
ttgtgttgaatctcttgtacttca

SEQ ID NO: 674 - RNA, 24 nt, synthetic construct
  source 1..24: mol_type = other RNA; note = Antisense oligonucleotide
  modified_base 1: mod_base = OTHER; note = backbone modification: 5'-phosphorothioate; note = sugar modification: 2'-O-methoxyethylribose; note = thymine
  modified_base 2: mod_base = OTHER; note = sugar modification: 2'-O-methoxyethylribose; note = thymine; note = backbone modification: 5'-phosphorothioate
  modified_base 3: mod_base = OTHER; note = sugar modification: 2'-O-methoxyethylribose; note = backbone modification: 5'-phosphorothioate
  modified_base 4: mod_base = OTHER; note = backbone modification: 5'-phosphorothioate; note = sugar modification: 2'-O-methoxyethylribose; note = thymine
  modified_base 5: mod_base = OTHER; note = backbone modification: 5'-phosphorothioate; note = sugar modification: 2'-O-methoxyethylribose
  modified_base 6: mod_base = OTHER; note = backbone modification: 5'-phosphorothioate; note = sugar modification: 2'-O-methoxyethylribose; note = thymine
  modified_base 7: mod_base = OTHER; note = thymine; note = backbone modification: 5'-phosphorothioate; note = sugar modification: 2'-O-methoxyethylribose
  modified_base 8: mod_base = OTHER; note = sugar modification: 2'-O-methoxyethylribose; note = backbone modification: 5'-phosphorothioate
  modified_base 9: mod_base = OTHER; note = backbone modification: 5'-phosphorothioate; note = sugar modification: 2'-O-methoxyethylribose
  modified_base 10: mod_base = OTHER; note = backbone modification: 5'-phosphorothioate; note = sugar modification: 2'-O-methoxyethylribose
  modified_base 11: mod_base = OTHER; note = thymine; note = sugar modification: 2'-O-methoxyethylribose; note = backbone modification: 5'-phosphorothioate
  modified_base 12: mod_base = OTHER; mod_base = m5c; note = backbone modification: 5'-phosphorothioate; note = sugar modification: 2'-O-methoxyethylribose
  modified_base 13: mod_base = OTHER; note = thymine; note = backbone modification: 5'-phosphorothioate; note = sugar modification: 2'-O-methoxyethylribose
  modified_base 14: mod_base = OTHER; note = sugar modification: 2'-O-methoxyethylribose; note = thymine; note = backbone modification: 5'-phosphorothioate
  modified_base 15: mod_base = m5c; mod_base = OTHER; note = sugar modification: 2'-O-methoxyethylribose; note = backbone modification: 5'-phosphorothioate
  modified_base 16: mod_base = OTHER; note = backbone modification: 5'-phosphorothioate; note = sugar modification: 2'-O-methoxyethylribose; note = thymine
  modified_base 17: mod_base = OTHER; note = thymine; note = backbone modification: 5'-phosphorothioate; note = sugar modification: 2'-O-methoxyethylribose
  modified_base 18: mod_base = OTHER; note = backbone modification: 5'-phosphorothioate; note = sugar modification: 2'-O-methoxyethylribose
  modified_base 19: mod_base = OTHER; note = thymine; note = sugar modification: 2'-O-methoxyethylribose; note = backbone modification: 5'-phosphorothioate
  modified_base 20: mod_base = OTHER; note = backbone modification: 5'-phosphorothioate; note = sugar modification: 2'-O-methoxyethylribose
  modified_base 21: mod_base = m5c; mod_base = OTHER; note = sugar modification: 2'-O-methoxyethylribose; note = backbone modification: 5'-phosphorothioate
  modified_base 22: mod_base = OTHER; note = thymine; note = sugar modification: 2'-O-methoxyethylribose; note = backbone modification: 5'-phosphorothioate
  modified_base 23: mod_base = OTHER; note = sugar modification: 2'-O-methoxyethylribose; note = thymine; note = backbone modification: 5'-phosphorothioate
  modified_base 24: mod_base = m5c; mod_base = OTHER; note = sugar modification: 2'-O-methoxyethylribose
ttgtgttgaatcttcttgtacttc

SEQ ID NO: 675 - RNA, 24 nt, synthetic construct
  source 1..24: mol_type = other RNA; note = Antisense oligonucleotide
  modified_base 1: mod_base = OTHER; note = backbone modification: 5'-phosphorothioate; note = sugar modification: 2'-O-methoxyethylribose; note = thymine
  modified_base 2: mod_base = OTHER; note = sugar modification: 2'-O-methoxyethylribose; note = backbone modification: 5'-phosphorothioate; note = thymine
  modified_base 3: mod_base = OTHER; note = backbone modification: 5'-phosphorothioate; note = sugar modification: 2'-O-methoxyethylribose
  modified_base 4: mod_base = OTHER; note = sugar modification: 2'-O-methoxyethylribose; note = thymine; note = backbone modification: 5'-phosphorothioate
  modified_base 5: mod_base = OTHER; note = sugar modification: 2'-O-methoxyethylribose; note = backbone modification: 5'-phosphorothioate
  modified_base 6: mod_base = OTHER; note = sugar modification: 2'-O-methoxyethylribose; note = backbone modification: 5'-phosphorothioate; note = thymine
  modified_base 7: mod_base = OTHER; note = thymine; note = sugar modification: 2'-O-methoxyethylribose; note = backbone modification: 5'-phosphorothioate
  modified_base 8: mod_base = OTHER; note = backbone modification: 5'-phosphorothioate; note = sugar modification: 2'-O-methoxyethylribose
  modified_base 9: mod_base = OTHER; note = backbone modification: 5'-phosphorothioate; note = sugar modification: 2'-O-methoxyethylribose
  modified_base 10: mod_base = OTHER; note = sugar modification: 2'-O-methoxyethylribose; note = backbone modification: 5'-phosphorothioate
  modified_base 11: mod_base = OTHER; note = sugar modification: 2'-O-methoxyethylribose; note = backbone modification: 5'-phosphorothioate; note = thymine
  modified_base 12: mod_base = m5c; mod_base = OTHER; note = sugar modification: 2'-O-methoxyethylribose; note = backbone modification: 5'-phosphorothioate
  modified_base 13: mod_base = OTHER; note = backbone modification: 5'-phosphorothioate; note = sugar modification: 2'-O-methoxyethylribose
  modified_base 14: mod_base = OTHER; note = backbone modification: 5'-phosphorothioate; note = thymine; note = sugar modification: 2'-O-methoxyethylribose
  modified_base 15: mod_base = OTHER; note = thymine; note = sugar modification: 2'-O-methoxyethylribose; note = backbone modification: 5'-phosphorothioate
  modified_base 16: mod_base = OTHER; mod_base = m5c; note = sugar modification: 2'-O-methoxyethylribose; note = backbone modification: 5'-phosphorothioate
  modified_base 17: mod_base = OTHER; note = backbone modification: 5'-phosphorothioate; note = sugar modification: 2'-O-methoxyethylribose; note = thymine
  modified_base 18: mod_base = OTHER; note = thymine; note = sugar modification: 2'-O-methoxyethylribose; note = backbone modification: 5'-phosphorothioate
  modified_base 19: mod_base = OTHER; note = sugar modification: 2'-O-methoxyethylribose; note = backbone modification: 5'-phosphorothioate
  modified_base 20: mod_base = OTHER; note = backbone modification: 5'-phosphorothioate; note = sugar modification: 2'-O-methoxyethylribose; note = thymine
  modified_base 21: mod_base = OTHER; note = backbone modification: 5'-phosphorothioate; note = sugar modification: 2'-O-methoxyethylribose
  modified_base 22: mod_base = OTHER; mod_base = m5c; note = backbone modification: 5'-phosphorothioate; note = sugar modification: 2'-O-methoxyethylribose
  modified_base 23: mod_base = OTHER; note = sugar modification: 2'-O-methoxyethylribose; note = thymine; note = backbone modification: 5'-phosphorothioate
  modified_base 24: mod_base = OTHER; note = thymine; note = sugar modification: 2'-O-methoxyethylribose
ttgtgttgaatcgttcttgtactt

SEQ ID NO: 676 - RNA, 24 nt, synthetic construct
  source 1..24: mol_type = other RNA; note = Antisense oligonucleotide
  modified_base 1: mod_base = OTHER; note = sugar modification: 2'-O-methoxyethylribose; note = backbone modification: 5'-phosphorothioate
  modified_base 2: mod_base = OTHER; note = sugar modification: 2'-O-methoxyethylribose; note = backbone modification: 5'-phosphorothioate; note = thymine
  modified_base 3: mod_base = OTHER; note = sugar modification: 2'-O-methoxyethylribose; note = backbone modification: 5'-phosphorothioate; note = thymine
  modified_base 4: mod_base = OTHER; mod_base = m5c; note = sugar modification: 2'-O-methoxyethylribose; note = backbone modification: 5'-phosphorothioate
  modified_base 5: mod_base = OTHER; note = sugar modification: 2'-O-methoxyethylribose; note = backbone modification: 5'-phosphorothioate
  modified_base 6: mod_base = OTHER; note = backbone modification: 5'-phosphorothioate; note = sugar modification: 2'-O-methoxyethylribose
  modified_base 7: mod_base = OTHER; mod_base = m5c; note = backbone modification: 5'-phosphorothioate; note = sugar modification: 2'-O-methoxyethylribose
  modified_base 8: mod_base = OTHER; note = backbone modification: 5'-phosphorothioate; note = sugar modification: 2'-O-methoxyethylribose
  modified_base 9: mod_base = OTHER; mod_base = m5c; note = sugar modification: 2'-O-methoxyethylribose; note = backbone modification: 5'-phosphorothioate
  modified_base 10: mod_base = OTHER; note = backbone modification: 5'-phosphorothioate; note = sugar modification: 2'-O-methoxyethylribose
  modified_base 11: mod_base = OTHER; note = backbone modification: 5'-phosphorothioate; note = sugar modification: 2'-O-methoxyethylribose
  modified_base 12: mod_base = OTHER; note = sugar modification: 2'-O-methoxyethylribose; note = backbone modification: 5'-phosphorothioate; note = thymine
  modified_base 13: mod_base = OTHER; note = sugar modification: 2'-O-methoxyethylribose; note = thymine; note = backbone modification: 5'-phosphorothioate
  modified_base 14: mod_base = OTHER; mod_base = m5c; note = sugar modification: 2'-O-methoxyethylribose; note = backbone modification: 5'-phosphorothioate
  modified_base 15: mod_base = OTHER; note = sugar modification: 2'-O-methoxyethylribose; note = backbone modification: 5'-phosphorothioate; note = thymine
  modified_base 16: mod_base = OTHER; note = sugar modification: 2'-O-methoxyethylribose; note = thymine; note = backbone modification: 5'-phosphorothioate
  modified_base 17: mod_base = OTHER; note = backbone modification: 5'-phosphorothioate; note = sugar modification: 2'-O-methoxyethylribose
  modified_base 18: mod_base = OTHER; note = sugar modification: 2'-O-methoxyethylribose; note = thymine; note = backbone modification: 5'-phosphorothioate
  modified_base 19: mod_base = OTHER; note = sugar modification: 2'-O-methoxyethylribose; note = backbone modification: 5'-phosphorothioate
  modified_base 20: mod_base = OTHER; mod_base = m5c; note = sugar modification: 2'-O-methoxyethylribose; note = backbone modification: 5'-phosphorothioate
  modified_base 21: mod_base = OTHER; note = backbone modification: 5'-phosphorothioate; note = sugar modification: 2'-O-methoxyethylribose; note = thymine
  modified_base 22: mod_base = OTHER; note = thymine; note = sugar modification: 2'-O-methoxyethylribose; note = backbone modification: 5'-phosphorothioate
  modified_base 23: mod_base = OTHER; mod_base = m5c; note = sugar modification: 2'-O-methoxyethylribose; note = backbone modification: 5'-phosphorothioate
  modified_base 24: mod_base = OTHER; note = sugar modification: 2'-O-methoxyethylribose
attcaacacaattcttgtacttca

SEQ ID NO: 677 - RNA, 18 nt, synthetic construct
  source 1..18: mol_type = other RNA; note = Antisense oligonucleotide
  modified_base 1: mod_base = OTHER; note = sugar modification: 2'-O-methoxyethylribose; note = thymine; note = backbone modification: 5'-phosphorothioate
  modified_base 2: mod_base = OTHER; note = sugar modification: 2'-O-methoxyethylribose; note = backbone modification: 5'-phosphorothioate
  modified_base 3: mod_base = OTHER; note = thymine; note = backbone modification: 5'-phosphorothioate; note = sugar modification: 2'-O-methoxyethylribose
  modified_base 4: mod_base = OTHER; note = backbone modification: 5'-phosphorothioate; note = thymine; note = sugar modification: 2'-O-methoxyethylribose
  modified_base 5: mod_base = OTHER; mod_base = m5c; note = backbone modification: 5'-phosphorothioate; note = sugar modification: 2'-O-methoxyethylribose
  modified_base 6: mod_base = OTHER; note = thymine; note = backbone modification: 5'-phosphorothioate; note = sugar modification: 2'-O-methoxyethylribose
  modified_base 7: mod_base = OTHER; note = backbone modification: 5'-phosphorothioate
  modified_base 8: mod_base = OTHER; note = backbone modification: 5'-phosphorothioate
  modified_base 9: mod_base = OTHER; note = sugar modification: 2'-O-methoxyethylribose; note = backbone modification: 5'-phosphorothioate; note = thymine
  modified_base 10: mod_base = OTHER; note = backbone modification: 5'-phosphorothioate; note = sugar modification: 2'-O-methoxyethylribose
  modified_base 11: mod_base = OTHER; mod_base = m5c; note = sugar modification: 2'-O-methoxyethylribose; note = backbone modification: 5'-phosphorothioate
  modified_base 12: mod_base = OTHER; note = backbone modification: 5'-phosphorothioate; note = sugar modification: 2'-O-methoxyethylribose; note = thymine
  modified_base 13: mod_base = OTHER; note = thymine; note = sugar modification: 2'-O-methoxyethylribose; note = backbone modification: 5'-phosphorothioate
  modified_base 14: mod_base = OTHER; note = backbone modification: 5'-phosphorothioate
  modified_base 15: mod_base = OTHER; note = backbone modification: 5'-phosphorothioate
  modified_base 16: mod_base = OTHER; note = backbone modification: 5'-phosphorothioate; note = thymine; note = sugar modification: 2'-O-methoxyethylribose
  modified_base 17: mod_base = m5c; mod_base = OTHER; note = backbone modification: 5'-phosphorothioate; note = sugar modification: 2'-O-methoxyethylribose
  modified_base 18: mod_base = OTHER; mod_base = m5c; note = sugar modification: 2'-O-methoxyethylribose
tgttcttgtacttcatcc

SEQ ID NO: 678 - RNA, 18 nt, synthetic construct
  source 1..18: mol_type = other RNA; note = Antisense oligonucleotide
  modified_base 1: mod_base = OTHER; note = sugar modification: 2'-O-methoxyethylribose; note = backbone modification: 5'-phosphorothioate; note = thymine
  modified_base 2: mod_base = OTHER; note = sugar modification: 2'-O-methoxyethylribose; note = backbone modification: 5'-phosphorothioate
  modified_base 3: mod_base = OTHER; note = thymine; note = sugar modification: 2'-O-methoxyethylribose; note = backbone modification: 5'-phosphorothioate
  modified_base 4: mod_base = OTHER; note = sugar modification: 2'-O-methoxyethylribose; note = thymine; note = backbone modification: 5'-phosphorothioate
  modified_base 5: mod_base = OTHER; mod_base = m5c; note = backbone modification: 5'-phosphorothioate; note = sugar modification: 2'-O-methoxyethylribose
  modified_base 6: mod_base = OTHER; note = sugar modification: 2'-O-methoxyethylribose; note = backbone modification: 5'-phosphorothioate; note = thymine
  modified_base 7: mod_base = OTHER; note = backbone modification: 5'-phosphorothioate
  modified_base 8: mod_base = OTHER; note = backbone modification: 5'-phosphorothioate
  modified_base 9: mod_base = OTHER; note = thymine; note = sugar modification: 2'-O-methoxyethylribose; note = backbone modification: 5'-phosphorothioate
  modified_base 10: mod_base = OTHER; note = backbone modification: 5'-phosphorothioate; note = sugar modification: 2'-O-methoxyethylribose
  modified_base 11: mod_base = OTHER; mod_base = m5c; note = backbone modification: 5'-phosphorothioate; note = sugar modification: 2'-O-methoxyethylribose
  modified_base 12: mod_base = OTHER; note = backbone modification: 5'-phosphorothioate; note = sugar modification: 2'-O-methoxyethylribose; note = thymine
  modified_base 13: mod_base = OTHER; note = thymine; note = backbone modification: 5'-phosphorothioate; note = sugar modification: 2'-O-methoxyethylribose
  modified_base 14: mod_base = OTHER; mod_base = m5c; note = backbone modification: 5'-phosphorothioate; note = sugar modification: 2'-O-methoxyethylribose
  modified_base 15: mod_base = OTHER; note = backbone modification: 5'-phosphorothioate
  modified_base 16: mod_base = OTHER; note = backbone modification: 5'-phosphorothioate; note = thymine; note = sugar modification: 2'-O-methoxyethylribose
  modified_base 17: mod_base = OTHER; mod_base = m5c; note = sugar modification: 2'-O-methoxyethylribose; note = backbone modification: 5'-phosphorothioate
  modified_base 18: mod_base = OTHER; mod_base = m5c; note = sugar modification: 2'-O-methoxyethylribose
tgttcttgtacttcatcc

SEQ ID NO: 679 - RNA, 18 nt, synthetic construct
  source 1..18: mol_type = other RNA; note = Antisense oligonucleotide
  modified_base 1: mod_base = OTHER; note = sugar modification: 2'-O-methoxyethylribose; note = backbone modification: 5'-phosphorothioate; note = thymine
  modified_base 2: mod_base = OTHER; note = sugar modification: 2'-O-methoxyethylribose; note = backbone modification: 5'-phosphorothioate
  modified_base 3: mod_base = OTHER; note = backbone modification: 5'-phosphorothioate; note = thymine; note = sugar modification: 2'-O-methoxyethylribose
  modified_base 4: mod_base = OTHER; note = backbone modification: 5'-phosphorothioate; note = sugar modification: 2'-O-methoxyethylribose; note = thymine
  modified_base 5: mod_base = m5c; mod_base = OTHER; note = sugar modification: 2'-O-methoxyethylribose; note = backbone modification: 5'-phosphorothioate
  modified_base 6: mod_base = OTHER; note = backbone modification: 5'-phosphorothioate; note = sugar modification: 2'-O-methoxyethylribose; note = thymine
  modified_base 7: mod_base = OTHER; note = backbone modification: 5'-phosphorothioate; note = sugar modification: lna; note = thymine
  modified_base 8: mod_base = OTHER; note = sugar modification: lna; note = backbone modification: 5'-phosphorothioate
  modified_base 9: mod_base = OTHER; note = backbone modification: 5'-phosphorothioate; note = sugar modification: 2'-O-methoxyethylribose; note = thymine
  modified_base 10: mod_base = OTHER; note = sugar modification: 2'-O-methoxyethylribose; note = backbone modification: 5'-phosphorothioate
  modified_base 11: mod_base = m5c; mod_base = OTHER; note = sugar modification: 2'-O-methoxyethylribose; note = backbone modification: 5'-phosphorothioate
  modified_base 12: mod_base = OTHER; note = backbone modification: 5'-phosphorothioate; note = thymine; note = sugar modification: 2'-O-methoxyethylribose
  modified_base 13: mod_base = OTHER; note = thymine; note = backbone modification: 5'-phosphorothioate; note = sugar modification: 2'-O-methoxyethylribose
  modified_base 14: mod_base = OTHER; mod_base = m5c; note = sugar modification: lna; note = backbone modification: 5'-phosphorothioate
  modified_base 15: mod_base = OTHER; note = backbone modification: 5'-phosphorothioate; note = sugar modification: lna
  modified_base 16: mod_base = OTHER; note = thymine; note = backbone modification: 5'-phosphorothioate; note = sugar modification: 2'-O-methoxyethylribose
  modified_base 17: mod_base = m5c; mod_base = OTHER; note = backbone modification: 5'-phosphorothioate; note = sugar modification: 2'-O-methoxyethylribose
  modified_base 18: mod_base = OTHER; mod_base = m5c; note = sugar modification: 2'-O-methoxyethylribose
tgttcttgtacttcatcc

SEQ ID NO: 680 - RNA, 18 nt, synthetic construct
  source 1..18: mol_type = other RNA; note = Antisense oligonucleotide
  modified_base 1: mod_base = OTHER; note = sugar modification: 2'-O-methoxyethylribose; note = thymine; note = backbone modification: 5'-phosphorothioate
  modified_base 2: mod_base = OTHER; note = backbone modification: 5'-phosphorothioate; note = sugar modification: 2'-O-methoxyethylribose
  modified_base 3: mod_base = OTHER; note = backbone modification: 5'-phosphorothioate; note = sugar modification: 2'-O-methoxyethylribose; note = thymine
  modified_base 4: mod_base = OTHER; note = backbone modification: 5'-phosphorothioate; note = sugar modification: 2'-O-methoxyethylribose; note = thymine
  modified_base 5: mod_base = OTHER; mod_base = m5c; note = backbone modification: 5'-phosphorothioate; note = sugar modification: 2'-O-methoxyethylribose
  modified_base 6: mod_base = OTHER; note = sugar modification: 2'-O-methoxyethylribose; note = backbone modification: 5'-phosphorothioate; note = thymine
  modified_base 7: mod_base = OTHER; note = backbone modification: 5'-phosphorothioate; note = sugar modification: lna; note = thymine
  modified_base 8: mod_base = OTHER; note = backbone modification: 5'-phosphorothioate; note = sugar modification: lna
  modified_base 9: mod_base = OTHER; note = backbone modification: 5'-phosphorothioate; note = thymine; note = sugar modification: 2'-O-methoxyethylribose
  modified_base 10: mod_base = OTHER; note = sugar modification: 2'-O-methoxyethylribose; note = backbone modification: 5'-phosphorothioate
  modified_base 11: mod_base = m5c; mod_base = OTHER; note = sugar modification: 2'-O-methoxyethylribose; note = backbone modification: 5'-phosphorothioate
  modified_base 12: mod_base = OTHER; note = thymine; note = sugar modification: 2'-O-methoxyethylribose; note = backbone modification: 5'-phosphorothioate
  modified_base 13: mod_base = OTHER; note = sugar modification: 2'-O-methoxyethylribose; note = thymine; note = backbone modification: 5'-phosphorothioate
  modified_base 14: mod_base = OTHER; mod_base = m5c; note = backbone modification: 5'-phosphorothioate; note = sugar modification: 2'-O-methoxyethylribose
  modified_base 15: mod_base = OTHER; note = backbone modification: 5'-phosphorothioate; note = sugar modification: 2'-O-methoxyethylribose
  modified_base 16: mod_base = OTHER; note = thymine; note = sugar modification: 2'-O-methoxyethylribose; note = backbone modification: 5'-phosphorothioate
  modified_base 17: mod_base = m5c; mod_base = OTHER; note = sugar modification: 2'-O-methoxyethylribose; note = backbone modification: 5'-phosphorothioate
  modified_base 18: mod_base = OTHER; mod_base = m5c; note = sugar modification: 2'-O-methoxyethylribose
tgttcttgtacttcatcc

SEQ ID NO: 681 - RNA, 18 nt, synthetic construct
  source 1..18: mol_type = other RNA; note = Antisense oligonucleotide
  modified_base 1: mod_base = OTHER; note = sugar modification: 2'-O-methoxyethylribose; note = backbone modification: 5'-phosphorothioate; note = thymine
  modified_base 2: mod_base = OTHER; note = backbone modification: 5'-phosphorothioate; note = sugar modification: 2'-O-methoxyethylribose
  modified_base 3: mod_base = OTHER; note = backbone modification: 5'-phosphorothioate; note = sugar modification: 2'-O-methoxyethylribose; note = thymine
  modified_base 4: mod_base = OTHER; note = thymine; note = backbone modification: 5'-phosphorothioate; note = sugar modification: 2'-O-methoxyethylribose
  modified_base 5: mod_base = m5c; mod_base = OTHER; note = backbone modification: 5'-phosphorothioate; note = sugar modification: 2'-O-methoxyethylribose
  modified_base 6: mod_base = OTHER; note = sugar modification: 2'-O-methoxyethylribose; note = backbone modification: 5'-phosphorothioate; note = thymine
  modified_base 7: mod_base = OTHER; note = sugar modification: 2'-O-methoxyethylribose; note = backbone modification: 5'-phosphorothioate; note = thymine
  modified_base 8: mod_base = OTHER; note = sugar modification: 2'-O-methoxyethylribose; note = backbone modification: 5'-phosphorothioate
  modified_base 9: mod_base = OTHER; note = thymine; note = sugar modification: 2'-O-methoxyethylribose; note = backbone modification: 5'-phosphorothioate
  modified_base 10: mod_base = OTHER; note = sugar modification: 2'-O-methoxyethylribose; note = backbone modification: 5'-phosphorothioate
  modified_base 11: mod_base = OTHER; mod_base = m5c; note = backbone modification: 5'-phosphorothioate; note = sugar modification: 2'-O-methoxyethylribose
  modified_base 12: mod_base = OTHER; note = thymine; note = sugar modification: 2'-O-methoxyethylribose; note = backbone modification: 5'-phosphorothioate
  modified_base 13: mod_base = OTHER; note = thymine; note = sugar modification: 2'-O-methoxyethylribose; note = backbone modification: 5'-phosphorothioate
  modified_base 14: mod_base = OTHER; mod_base = m5c; note = sugar modification: lna; note = backbone modification: 5'-phosphorothioate
  modified_base 15: mod_base = OTHER; note = backbone modification: 5'-phosphorothioate; note = sugar modification: lna
  modified_base 16: mod_base = OTHER; note = thymine; note = sugar modification: 2'-O-methoxyethylribose; note = backbone modification: 5'-phosphorothioate
  modified_base 17: mod_base = m5c; mod_base = OTHER; note = backbone modification: 5'-phosphorothioate; note = sugar modification: 2'-O-methoxyethylribose
  modified_base 18: mod_base = m5c; mod_base = OTHER; note = sugar modification: 2'-O-methoxyethylribose
tgttcttgtacttcatcc

SEQ ID NO: 682 - RNA, 18 nt, synthetic construct
  source 1..18: mol_type = other RNA; note = Antisense oligonucleotide
  modified_base 1: mod_base = OTHER; note = backbone modification: 5'-phosphorothioate; note = thymine; note = sugar modification: 2'-O-methoxyethylribose
  modified_base 2: mod_base = OTHER; note = backbone modification: 5'-phosphorothioate; note = sugar modification: 2'-O-methoxyethylribose
  modified_base 3: mod_base = OTHER; note = sugar modification: 2'-O-methoxyethylribose; note = thymine; note = backbone modification: 5'-phosphorothioate
  modified_base 4: mod_base = OTHER; note = thymine; note = backbone modification: 5'-phosphorothioate; note = sugar modification: 2'-O-methoxyethylribose
  modified_base 5: mod_base = OTHER; mod_base = m5c; note = sugar modification: 2'-O-methoxyethylribose; note = backbone modification: 5'-phosphorothioate
  modified_base 6: mod_base = OTHER; note = backbone modification: 5'-phosphorothioate; note = sugar modification: 2'-O-methoxyethylribose; note = thymine
  modified_base 7: mod_base = OTHER; note = thymine; note = sugar modification: 2'-O-methoxyethylribose; note = backbone modification: 5'-phosphorothioate
  modified_base 8: mod_base = OTHER; note = backbone modification: 5'-phosphorothioate; note = sugar modification: lna
  modified_base 9: mod_base = OTHER; note = backbone modification: 5'-phosphorothioate; note = thymine; note = sugar modification: 2'-O-methoxyethylribose
  modified_base 10: mod_base = OTHER; note = backbone modification: 5'-phosphorothioate; note = sugar modification: 2'-O-methoxyethylribose
  modified_base 11: mod_base = m5c; mod_base = OTHER; note = backbone modification: 5'-phosphorothioate; note = sugar modification: 2'-O-methoxyethylribose
  modified_base 12: mod_base = OTHER; note = backbone modification: 5'-phosphorothioate; note = sugar modification: 2'-O-methoxyethylribose; note = thymine
  modified_base 13: mod_base = OTHER; note = backbone modification: 5'-phosphorothioate; note = sugar modification: 2'-O-methoxyethylribose; note = thymine
  modified_base 14: mod_base = OTHER; mod_base = m5c; note = backbone modification: 5'-phosphorothioate; note = sugar modification: lna
  modified_base 15: mod_base = OTHER; note = backbone modification: 5'-phosphorothioate; note = sugar modification: 2'-O-methoxyethylribose
  modified_base 16: mod_base = OTHER; note = backbone modification: 5'-phosphorothioate; note = sugar modification: 2'-O-methoxyethylribose; note = thymine
  modified_base 17: mod_base = m5c; mod_base = OTHER; note = backbone modification: 5'-phosphorothioate; note = sugar modification: 2'-O-methoxyethylribose
  modified_base 18: mod_base = m5c; mod_base = OTHER; note = sugar modification: 2'-O-methoxyethylribose
tgttcttgtacttcatcc

SEQ ID NO: 683 - RNA, 18 nt, synthetic construct
  source 1..18: mol_type = other RNA; note = Antisense oligonucleotide
  modified_base 1: mod_base = OTHER; note = sugar modification: 2'-O-methoxyethylribose; note = backbone modification: 5'-phosphorothioate; note = thymine
  modified_base 2: mod_base = OTHER; note = backbone modification: 5'-phosphorothioate; note = sugar modification: 2'-O-methoxyethylribose
  modified_base 3: mod_base = OTHER; note = backbone modification: 5'-phosphorothioate; note = sugar modification: 2'-O-methoxyethylribose; note = thymine
  modified_base 4: mod_base = OTHER; note = sugar modification: 2'-O-methoxyethylribose; note = thymine; note = backbone modification: 5'-phosphorothioate
  modified_base 5: mod_base = m5c; mod_base = OTHER; note = sugar modification: 2'-O-methoxyethylribose; note = backbone modification: 5'-phosphorothioate
  modified_base 6: mod_base = OTHER; note = thymine; note = backbone modification: 5'-phosphorothioate; note = sugar modification: 2'-O-methoxyethylribose
  modified_base 7: mod_base = OTHER; note = backbone modification: 5'-phosphorothioate; note = thymine; note = sugar modification: lna
  modified_base 8: mod_base = OTHER; note = sugar modification: 2'-O-methoxyethylribose; note = backbone modification: 5'-phosphorothioate
  modified_base 9: mod_base = OTHER; note = sugar modification: 2'-O-methoxyethylribose; note = thymine; note = backbone modification: 5'-phosphorothioate
  modified_base 10: mod_base = OTHER; note = backbone modification: 5'-phosphorothioate; note = sugar modification: 2'-O-methoxyethylribose
  modified_base 11: mod_base = OTHER; mod_base = m5c; note = sugar modification: 2'-O-methoxyethylribose; note = backbone modification: 5'-phosphorothioate
  modified_base 12: mod_base = OTHER; note = backbone modification: 5'-phosphorothioate; note = sugar modification: 2'-O-methoxyethylribose; note = thymine
  modified_base 13: mod_base = OTHER; note = backbone modification: 5'-phosphorothioate; note = sugar modification: 2'-O-methoxyethylribose; note = thymine
  modified_base 14: mod_base = OTHER; mod_base = m5c; note = backbone modification: 5'-phosphorothioate; note = sugar modification: 2'-O-methoxyethylribose
  modified_base 15: mod_base = OTHER; note = backbone modification: 5'-phosphorothioate; note = sugar modification: lna
  modified_base 16: mod_base = OTHER; note = thymine; note = sugar modification: 2'-O-methoxyethylribose; note = backbone modification: 5'-phosphorothioate
  modified_base 17: mod_base = m5c; mod_base = OTHER; note = sugar modification: 2'-O-methoxyethylribose; note = backbone modification: 5'-phosphorothioate
  modified_base 18: mod_base = m5c; mod_base = OTHER; note = sugar modification: 2'-O-methoxyethylribose
tgttcttgtacttcatcc

SEQ ID NO: 684 - RNA, 18 nt, synthetic construct
  source 1..18: mol_type = other RNA; note = Antisense oligonucleotide
  modified_base 1: mod_base = OTHER; note = backbone modification: 5'-phosphorothioate; note = sugar modification: 2'-O-methoxyethylribose; note = thymine
  modified_base 2: mod_base = OTHER; note = sugar modification: 2'-O-methoxyethylribose; note = backbone modification: 5'-phosphorothioate
  modified_base 3: mod_base = OTHER; note = backbone modification: 5'-phosphorothioate; note = thymine; note = sugar modification: 2'-O-methoxyethylribose
  modified_base 4: mod_base = OTHER; note = backbone modification: 5'-phosphorothioate; note = sugar modification: 2'-O-methoxyethylribose; note = thymine
  modified_base 5: mod_base = OTHER; mod_base = m5c; note = sugar modification: 2'-O-methoxyethylribose; note = backbone modification: 5'-phosphorothioate
  modified_base 6: mod_base = OTHER; note = backbone modification: 5'-phosphorothioate; note = thymine; note = sugar modification: 2'-O-methoxyethylribose
  modified_base 7: mod_base = OTHER; note = sugar modification: lna; note = backbone modification: 5'-phosphorothioate; note = thymine
  modified_base 8: mod_base = OTHER; note = sugar modification: lna; note = backbone modification: 5'-phosphorothioate
  modified_base 9: mod_base = OTHER; note = sugar modification: lna; note = thymine; note = backbone modification: 5'-phosphorothioate
  modified_base 10: mod_base = OTHER; note = sugar modification: lna; note = backbone modification: 5'-phosphorothioate
  modified_base 11: mod_base = m5c; mod_base = OTHER; note = sugar modification: lna; note = backbone modification: 5'-phosphorothioate
  modified_base 12: mod_base = OTHER; note = sugar modification: lna; note = thymine; note = backbone modification: 5'-phosphorothioate
  modified_base 13: mod_base = OTHER; note = backbone modification: 5'-phosphorothioate; note = thymine; note = sugar modification: lna
  modified_base 14: mod_base = OTHER; mod_base = m5c; note = backbone modification: 5'-phosphorothioate; note = sugar modification: lna
  modified_base 15: mod_base = OTHER; note = sugar modification: lna; note = backbone modification: 5'-phosphorothioate
  modified_base 16: mod_base = OTHER; note = backbone modification: 5'-phosphorothioate; note = thymine; note = sugar modification: 2'-O-methoxyethylribose
  modified_base 17: mod_base = OTHER; mod_base = m5c; note = backbone modification: 5'-phosphorothioate; note = sugar modification: 2'-O-methoxyethylribose
  modified_base 18: mod_base = OTHER; mod_base = m5c; note = sugar modification: 2'-O-methoxyethylribose
tgttcttgtacttcatcc

SEQ ID NO: 685 - RNA, 18 nt, synthetic construct
  source 1..18: mol_type = other RNA; note = Antisense oligonucleotide
  modified_base 1: mod_base = OTHER; note = sugar modification: 2'-O-methoxyethylribose; note = thymine; note = backbone modification: 5'-phosphorothioate
  modified_base 2: mod_base = OTHER; note = sugar modification: 2'-O-methoxyethylribose; note = backbone modification: 5'-phosphorothioate
  modified_base 3: mod_base = OTHER; note = backbone modification: 5'-phosphorothioate; note = thymine; note = sugar modification: 2'-O-methoxyethylribose
  modified_base 4: mod_base = OTHER; note = backbone modification: 5'-phosphorothioate; note = thymine; note = sugar modification: 2'-O-methoxyethylribose
  modified_base 5: mod_base = OTHER; mod_base = m5c; note = sugar modification: 2'-O-methoxyethylribose; note = backbone modification: 5'-phosphorothioate
  modified_base 6: mod_base = OTHER; note = backbone modification: 5'-phosphorothioate; note = thymine; note = sugar modification: 2'-O-methoxyethylribose
  modified_base 7: mod_base = OTHER; note = backbone modification: 5'-phosphorothioate
  modified_base 8: mod_base = OTHER; note = backbone modification: 5'-phosphorothioate
  modified_base 9: mod_base = OTHER; note = backbone modification: 5'-phosphorothioate
  modified_base 10: mod_base = OTHER; note = backbone modification: 5'-phosphorothioate
  modified_base 11: mod_base = OTHER; note = backbone modification: 5'-phosphorothioate
  modified_base 12: mod_base = OTHER; note = backbone modification: 5'-phosphorothioate
  modified_base 13: mod_base = OTHER; note = backbone modification: 5'-phosphorothioate
  modified_base 14: mod_base = OTHER; note = backbone modification: 5'-phosphorothioate
  modified_base 15: mod_base = OTHER; note = backbone modification: 5'-phosphorothioate
  modified_base 16: mod_base = OTHER; note = sugar modification: 2'-O-methoxyethylribose; note = backbone modification: 5'-phosphorothioate; note = thymine
  modified_base 17: mod_base = m5c; mod_base = OTHER; note = backbone modification: 5'-phosphorothioate; note = sugar modification: 2'-O-methoxyethylribose
  modified_base 18: mod_base = m5c; mod_base = OTHER; note = sugar modification: 2'-O-methoxyethylribose
tgttcttgtacttcatcc

SEQ ID NO: 686 - RNA, 18 nt, synthetic construct
  source 1..18: mol_type = other RNA; note = Antisense oligonucleotide
  modified_base 1: mod_base = OTHER; note = sugar modification: lna; note = backbone modification: 5'-phosphorothioate; note = thymine
  modified_base 2: mod_base = OTHER; note = sugar modification: lna; note = backbone modification: 5'-phosphorothioate
  modified_base 3: mod_base = OTHER; note = sugar modification: 2'-O-methoxyethylribose; note = thymine; note = backbone modification: 5'-phosphorothioate
  modified_base 4: mod_base = OTHER; note = sugar modification: 2'-O-methoxyethylribose; note = thymine; note = backbone modification: 5'-phosphorothioate
  modified_base 5: mod_base = OTHER; mod_base = m5c; note = sugar modification: 2'-O-methoxyethylribose; note = backbone modification: 5'-phosphorothioate
  modified_base 6: mod_base = OTHER; note = sugar modification: 2'-O-methoxyethylribose; note = thymine; note = backbone modification: 5'-phosphorothioate
  modified_base 7: mod_base = OTHER; note = backbone modification: 5'-phosphorothioate
  modified_base 8: mod_base = OTHER; note = backbone modification: 5'-phosphorothioate
  modified_base 9: mod_base = OTHER; note = thymine; note = backbone modification: 5'-phosphorothioate; note = sugar modification: 2'-O-methoxyethylribose
  modified_base 10: mod_base = OTHER; note = backbone modification: 5'-phosphorothioate; note = sugar modification: 2'-O-methoxyethylribose
  modified_base 11: mod_base = m5c; mod_base = OTHER; note = backbone modification: 5'-phosphorothioate; note = sugar modification: 2'-O-methoxyethylribose
  modified_base 12: mod_base = OTHER; note = sugar modification: 2'-O-methoxyethylribose; note = backbone modification: 5'-phosphorothioate; note = thymine
  modified_base 13: mod_base = OTHER; note = sugar modification: 2'-O-methoxyethylribose; note = backbone modification: 5'-phosphorothioate; note = thymine
  modified_base 14: mod_base = OTHER; note = backbone modification: 5'-phosphorothioate
  modified_base 15: mod_base = OTHER; note = backbone modification: 5'-phosphorothioate
  modified_base 16: mod_base = OTHER; note = backbone modification: 5'-phosphorothioate; note = thymine; note = sugar modification: 2'-O-methoxyethylribose
  modified_base 17: mod_base = m5c; mod_base = OTHER; note = backbone modification: 5'-phosphorothioate; note = sugar modification: lna
  modified_base 18: mod_base = m5c; mod_base = OTHER; note = sugar modification: lna
tgttcttgtacttcatcc

SEQ ID NO: 687 - RNA, 18 nt, synthetic construct
  source 1..18: mol_type = other RNA; note = Antisense oligonucleotide
  modified_base 1: mod_base = OTHER; note = backbone modification: 5'-phosphorothioate; note = thymine; note = sugar modification: lna
  modified_base 2: mod_base = OTHER; note = sugar modification: lna; note = backbone modification: 5'-phosphorothioate
  modified_base 3: mod_base = OTHER; note = thymine; note = sugar modification: 2'-O-methoxyethylribose; note = backbone modification: 5'-phosphorothioate
  modified_base 4: mod_base = OTHER; note = thymine; note = sugar modification: 2'-O-methoxyethylribose; note = backbone modification: 5'-phosphorothioate
  modified_base 5: mod_base = m5c; mod_base = OTHER; note = sugar modification: 2'-O-methoxyethylribose; note = backbone modification: 5'-phosphorothioate
  modified_base 6: mod_base = OTHER; note = thymine; note = backbone modification: 5'-phosphorothioate; note = sugar modification: 2'-O-methoxyethylribose
  modified_base 7: mod_base = OTHER; note = backbone modification: 5'-phosphorothioate
  modified_base 8: mod_base = OTHER; note = backbone modification: 5'-phosphorothioate
  modified_base 9: mod_base = OTHER; note = sugar modification: 2'-O-methoxyethylribose; note = backbone modification: 5'-phosphorothioate; note = thymine
  modified_base 10: mod_base = OTHER; note = backbone modification: 5'-phosphorothioate; note = sugar modification: 2'-O-methoxyethylribose
  modified_base 11: mod_base = OTHER; mod_base = m5c; note = backbone modification: 5'-phosphorothioate; note = sugar modification: 2'-O-methoxyethylribose
  modified_base 12: mod_base = OTHER; note = thymine; note = backbone modification: 5'-phosphorothioate; note = sugar modification: 2'-O-methoxyethylribose
  modified_base 13: mod_base = OTHER; note = backbone modification: 5'-phosphorothioate; note = sugar modification: 2'-O-methoxyethylribose; note = thymine
  modified_base 14: mod_base = m5c; mod_base = OTHER; note = backbone modification: 5'-phosphorothioate; note = sugar modification: 2'-O-methoxyethylribose
  modified_base 15: mod_base = OTHER; note = backbone modification: 5'-phosphorothioate
  modified_base 16: mod_base = OTHER; note = backbone modification: 5'-phosphorothioate; note = thymine; note = sugar modification: 2'-O-methoxyethylribose
  modified_base 17: mod_base = OTHER; mod_base = m5c; note = backbone modification: 5'-phosphorothioate; note = sugar modification: lna
  modified_base 18: mod_base = m5c; mod_base = OTHER; note = sugar modification: lna
tgttcttgtacttcatcc

SEQ ID NO: 688 - RNA, 18 nt, synthetic construct
  source 1..18: mol_type = other RNA; note = Antisense oligonucleotide
  modified_base 1: mod_base = OTHER; note = backbone modification: 5'-phosphorothioate; note = sugar modification: lna; note = thymine
  modified_base 2: mod_base = OTHER; note = backbone modification: 5'-phosphorothioate; note = sugar modification: lna
  modified_base 3: mod_base = OTHER; note = backbone modification: 5'-phosphorothioate; note = sugar modification: 2'-O-methoxyethylribose; note = thymine
  modified_base 4: mod_base = OTHER; note = thymine; note = backbone modification: 5'-phosphorothioate; note = sugar modification: 2'-O-methoxyethylribose
  modified_base 5: mod_base = OTHER; mod_base = m5c; note = sugar modification: 2'-O-methoxyethylribose; note = backbone modification: 5'-phosphorothioate
  modified_base 6: mod_base = OTHER; note = sugar modification: 2'-O-methoxyethylribose; note = backbone modification: 5'-phosphorothioate; note = thymine
  modified_base 7: mod_base = OTHER; note = sugar modification: lna; note = backbone modification: 5'-phosphorothioate; note = thymine
  modified_base 8: mod_base = OTHER; note = sugar modification: lna; note = backbone modification: 5'-phosphorothioate
  modified_base 9: mod_base = OTHER; note = backbone modification: 5'-phosphorothioate; note = thymine; note = sugar modification: 2'-O-methoxyethylribose
  modified_base 10: mod_base = OTHER; note = backbone modification: 5'-phosphorothioate; note = sugar modification: 2'-O-methoxyethylribose
  modified_base 11: mod_base = OTHER; mod_base = m5c; note = sugar modification: 2'-O-methoxyethylribose; note = backbone modification: 5'-phosphorothioate
  modified_base 12: mod_base = OTHER; note = backbone modification: 5'-phosphorothioate; note = thymine; note = sugar modification: 2'-O-methoxyethylribose
  modified_base 13: mod_base = OTHER; note = thymine; note = backbone modification: 5'-phosphorothioate; note = sugar modification: 2'-O-methoxyethylribose
  modified_base 14: mod_base = OTHER; mod_base = m5c; note = sugar modification: lna; note = backbone modification: 5'-phosphorothioate
  modified_base 15: mod_base = OTHER; note = backbone modification: 5'-phosphorothioate; note = sugar modification: lna
  modified_base 16: mod_base = OTHER; note = backbone modification: 5'-phosphorothioate; note = thymine; note = sugar modification: 2'-O-methoxyethylribose
  modified_base 17: mod_base = m5c; mod_base = OTHER; note = backbone modification: 5'-phosphorothioate; note = sugar modification: lna
  modified_base 18: mod_base = OTHER; mod_base = m5c; note = sugar modification: lna
tgttcttgtacttcatcc

SEQ ID NO: 689 - RNA, 18 nt, synthetic construct
  source 1..18: mol_type = other RNA; note = Antisense oligonucleotide
  modified_base 1: mod_base = OTHER; note = thymine; note = backbone modification: 5'-phosphorothioate; note = sugar modification: lna
  modified_base 2: mod_base = OTHER; note = backbone modification: 5'-phosphorothioate; note = sugar modification: lna
  modified_base 3: mod_base = OTHER; note = backbone modification: 5'-phosphorothioate; note = thymine; note = sugar modification: 2'-O-methoxyethylribose
  modified_base 4: mod_base = OTHER; note = backbone modification: 5'-phosphorothioate; note = sugar modification: 2'-O-methoxyethylribose; note = thymine
  modified_base 5: mod_base = OTHER; mod_base = m5c; note = sugar modification: 2'-O-methoxyethylribose; note = backbone modification: 5'-phosphorothioate
  modified_base 6: mod_base = OTHER; note = sugar modification: 2'-O-methoxyethylribose; note = thymine; note = backbone modification: 5'-phosphorothioate
  modified_base 7: mod_base = OTHER; note = backbone modification: 5'-phosphorothioate; note = sugar modification: lna; note = thymine
  modified_base 8: mod_base = OTHER; note = backbone modification: 5'-phosphorothioate; note = sugar modification: lna
  modified_base 9: mod_base = OTHER; note = backbone modification: 5'-phosphorothioate; note = sugar modification: 2'-O-methoxyethylribose; note = thymine
  modified_base 10: mod_base = OTHER; note = sugar modification: 2'-O-methoxyethylribose; note = backbone modification: 5'-phosphorothioate
  modified_base 11: mod_base = OTHER; mod_base = m5c; note = sugar modification: 2'-O-methoxyethylribose; note = backbone modification: 5'-phosphorothioate
  modified_base 12: mod_base = OTHER; note = sugar modification: 2'-O-methoxyethylribose; note = thymine; note = backbone modification: 5'-phosphorothioate
  modified_base 13: mod_base = OTHER; note = backbone modification: 5'-phosphorothioate; note = sugar modification: 2'-O-methoxyethylribose; note = thymine
  modified_base 14: mod_base = OTHER; mod_base = m5c; note = backbone modification: 5'-phosphorothioate; note = sugar modification: 2'-O-methoxyethylribose
  modified_base 15: mod_base = OTHER; note = backbone modification: 5'-phosphorothioate; note = sugar modification: 2'-O-methoxyethylribose
  modified_base 16: mod_base = OTHER; note = backbone modification: 5'-phosphorothioate; note = thymine; note = sugar modification: 2'-O-methoxyethylribose
  modified_base 17: mod_base = m5c; mod_base = OTHER; note = sugar modification: lna; note = backbone modification: 5'-phosphorothioate
  modified_base 18: mod_base = OTHER; mod_base = m5c; note = sugar modification: lna
tgttcttgtacttcatcc

SEQ ID NO: 690 - RNA, 18 nt, synthetic construct
  source 1..18: mol_type = other RNA; note = Antisense oligonucleotide
  modified_base 1: mod_base = OTHER; note = thymine; note = backbone modification: 5'-phosphorothioate; note = sugar modification: lna
  modified_base 2: mod_base = OTHER; note = sugar modification: lna; note = backbone modification: 5'-phosphorothioate
  modified_base 3: mod_base = OTHER; note = sugar modification: 2'-O-methoxyethylribose; note = thymine; note = backbone modification: 5'-phosphorothioate
  modified_base 4: mod_base = OTHER; note = backbone modification: 5'-phosphorothioate; note = sugar modification: 2'-O-methoxyethylribose; note = thymine
  modified_base 5: mod_base = OTHER; mod_base = m5c; note = sugar modification: 2'-O-methoxyethylribose; note = backbone modification: 5'-phosphorothioate
  modified_base 6: mod_base = OTHER; note = sugar modification: 2'-O-methoxyethylribose; note = backbone modification: 5'-phosphorothioate; note = thymine
  modified_base 7: mod_base = OTHER; note = backbone modification: 5'-phosphorothioate; note = sugar modification: 2'-O-methoxyethylribose; note = thymine
  modified_base 8: mod_base = OTHER; note = sugar modification: 2'-O-methoxyethylribose; note = backbone modification: 5'-phosphorothioate
  modified_base 9: mod_base = OTHER; note = thymine; note = sugar modification: 2'-O-methoxyethylribose; note = backbone modification: 5'-phosphorothioate
  modified_base 10: mod_base = OTHER; note = backbone modification: 5'-phosphorothioate; note = sugar modification: 2'-O-methoxyethylribose
  modified_base 11: mod_base = m5c; mod_base = OTHER; note = backbone modification: 5'-phosphorothioate; note = sugar modification: 2'-O-methoxyethylribose
  modified_base 12: mod_base = OTHER; note = sugar modification: 2'-O-methoxyethylribose; note = backbone modification: 5'-phosphorothioate; note = thymine
  modified_base 13: mod_base = OTHER; note = sugar modification: 2'-O-methoxyethylribose; note = thymine; note = backbone modification: 5'-phosphorothioate
  modified_base 14: mod_base = OTHER; mod_base = m5c; note = backbone modification: 5'-phosphorothioate; note = sugar modification: lna
  modified_base 15: mod_base = OTHER; note = sugar modification: lna; note = backbone modification: 5'-phosphorothioate
  modified_base 16: mod_base = OTHER; note = thymine; note = sugar modification: 2'-O-methoxyethylribose; note = backbone modification: 5'-phosphorothioate
  modified_base 17: mod_base = OTHER; mod_base = m5c; note = backbone modification: 5'-phosphorothioate; note = sugar modification: lna
  modified_base 18: mod_base = m5c; mod_base = OTHER; note = sugar modification: lna
tgttcttgtacttcatcc

SEQ ID NO: 691 - RNA, 18 nt, synthetic construct
  source 1..18: mol_type = other RNA; note = Antisense oligonucleotide
  modified_base 1: mod_base = OTHER; note = sugar modification: lna; note = backbone modification: 5'-phosphorothioate; note = thymine
  modified_base 2: mod_base = OTHER; note = sugar modification: lna; note = backbone modification: 5'-phosphorothioate
  modified_base 3: mod_base = OTHER; note = thymine; note = sugar modification: 2'-O-methoxyethylribose; note = backbone modification: 5'-phosphorothioate
  modified_base 4: mod_base = OTHER; note = sugar modification: 2'-O-methoxyethylribose; note = thymine; note = backbone modification: 5'-phosphorothioate
  modified_base 5: mod_base = OTHER; mod_base = m5c; note = sugar modification: 2'-O-methoxyethylribose; note = backbone modification: 5'-phosphorothioate
  modified_base 6: mod_base = OTHER; note = backbone modification: 5'-phosphorothioate; note = sugar modification: 2'-O-methoxyethylribose; note = thymine
  modified_base 7: mod_base = OTHER; note = sugar modification: 2'-O-methoxyethylribose; note = backbone modification: 5'-phosphorothioate; note = thymine
  modified_base 8: mod_base = OTHER; note = sugar modification: lna; note = backbone modification: 5'-phosphorothioate
  modified_base 9: mod_base = OTHER; note = sugar modification: 2'-O-methoxyethylribose; note = backbone modification: 5'-phosphorothioate; note = thymine
  modified_base 10: mod_base = OTHER; note = backbone modification: 5'-phosphorothioate; note = sugar modification: 2'-O-methoxyethylribose
  modified_base 11: mod_base = m5c; mod_base = OTHER; note = backbone modification: 5'-phosphorothioate; note = sugar modification: 2'-O-methoxyethylribose
  modified_base 12: mod_base = OTHER; note = backbone modification: 5'-phosphorothioate; note = thymine; note = sugar modification: 2'-O-methoxyethylribose
  modified_base 13: mod_base = OTHER; note = sugar modification: 2'-O-methoxyethylribose; note = thymine; note = backbone modification: 5'-phosphorothioate
  modified_base 14: mod_base = m5c; mod_base = OTHER; note = sugar modification: lna; note = backbone modification: 5'-phosphorothioate
  modified_base 15: mod_base = OTHER; note = sugar modification: 2'-O-methoxyethylribose; note = backbone modification: 5'-phosphorothioate
  modified_base 16: mod_base = OTHER; note = backbone modification: 5'-phosphorothioate; note = sugar modification: 2'-O-methoxyethylribose; note = thymine
  modified_base 17: mod_base = m5c; mod_base = OTHER; note = sugar modification: lna; note = backbone modification: 5'-phosphorothioate
  modified_base 18: mod_base = m5c; mod_base = OTHER; note = sugar modification: lna
tgttcttgtacttcatcc

SEQ ID NO: 692 - RNA, 18 nt, synthetic construct
  source 1..18: mol_type = other RNA; note = Antisense oligonucleotide
  modified_base 1: mod_base = OTHER; note = sugar modification: lna; note = thymine; note = backbone modification: 5'-phosphorothioate
  modified_base 2: mod_base = OTHER; note = backbone modification: 5'-phosphorothioate; note = sugar modification: lna
  modified_base 3: mod_base = OTHER; note = thymine; note = backbone modification: 5'-phosphorothioate; note = sugar modification: 2'-O-methoxyethylribose
  modified_base 4: mod_base = OTHER; note = thymine; note = backbone modification: 5'-phosphorothioate; note = sugar modification: 2'-O-methoxyethylribose
  modified_base 5: mod_base = m5c; mod_base = OTHER; note = backbone modification: 5'-phosphorothioate; note = sugar modification: 2'-O-methoxyethylribose
  modified_base 6: mod_base = OTHER; note = sugar modification: 2'-O-methoxyethylribose; note = thymine; note = backbone modification: 5'-phosphorothioate
  modified_base 7: mod_base = OTHER; note = thymine; note = sugar modification: lna; note = backbone modification: 5'-phosphorothioate
  modified_base 8: mod_base = OTHER; note = backbone modification: 5'-phosphorothioate; note = sugar modification: 2'-O-methoxyethylribose
  modified_base 9: mod_base = OTHER; note = thymine; note = backbone modification: 5'-phosphorothioate; note = sugar modification: 2'-O-methoxyethylribose
  modified_base 10: mod_base = OTHER; note = sugar modification: 2'-O-methoxyethylribose; note = backbone modification: 5'-phosphorothioate
  modified_base 11: mod_base = OTHER; mod_base = m5c; note = backbone modification: 5'-phosphorothioate; note = sugar modification: 2'-O-methoxyethylribose
  modified_base 12: mod_base = OTHER; note = backbone modification: 5'-phosphorothioate; note = sugar modification: 2'-O-methoxyethylribose; note = thymine
  modified_base 13: mod_base = OTHER; note = backbone modification: 5'-phosphorothioate; note = sugar modification: 2'-O-methoxyethylribose; note = thymine
  modified_base 14: mod_base = OTHER; mod_base = m5c; note = backbone modification: 5'-phosphorothioate; note = sugar modification: 2'-O-methoxyethylribose
  modified_base 15: mod_base = OTHER; note = backbone modification: 5'-phosphorothioate; note = sugar modification: lna
  modified_base 16: mod_base = OTHER; note = backbone modification: 5'-phosphorothioate; note = thymine; note = sugar modification: 2'-O-methoxyethylribose
  modified_base 17: mod_base = OTHER; mod_base = m5c; note = backbone modification: 5'-phosphorothioate; note = sugar modification: lna
  modified_base 18: mod_base = m5c; mod_base = OTHER; note = sugar modification: lna
tgttcttgtacttcatcc

SEQ ID NO: 693 - RNA, 18 nt, synthetic construct
  source 1..18: mol_type = other RNA; note = Antisense oligonucleotide
  modified_base 1: mod_base = OTHER; note = backbone modification: 5'-phosphorothioate; note = thymine; note = sugar modification: lna
  modified_base 2: mod_base = OTHER; note = sugar modification: lna; note = backbone modification: 5'-phosphorothioate
  modified_base 3: mod_base = OTHER; note = thymine; note = backbone modification: 5'-phosphorothioate; note = sugar modification: 2'-O-methoxyethylribose
  modified_base 4: mod_base = OTHER; note = backbone modification: 5'-phosphorothioate; note = sugar modification: 2'-O-methoxyethylribose; note = thymine
  modified_base 5: mod_base = m5c; mod_base = OTHER; note = backbone modification: 5'-phosphorothioate; note = sugar modification: 2'-O-methoxyethylribose
  modified_base 6: mod_base = OTHER; note = sugar modification: 2'-O-methoxyethylribose; note = backbone modification: 5'-phosphorothioate; note = thymine
  modified_base 7: mod_base = OTHER; note = backbone modification: 5'-phosphorothioate; note = sugar modification: lna; note = thymine
  modified_base 8: mod_base = OTHER; note = sugar modification: lna; note = backbone modification: 5'-phosphorothioate
  modified_base 9: mod_base = OTHER; note = thymine; note = sugar modification: lna; note = backbone modification: 5'-phosphorothioate
  modified_base 10: mod_base = OTHER; note = backbone modification: 5'-phosphorothioate; note = sugar modification: lna
  modified_base 11: mod_base = OTHER; mod_base = m5c; note = sugar modification: lna; note = backbone modification: 5'-phosphorothioate
  modified_base 12: mod_base = OTHER; note = backbone modification: 5'-phosphorothioate; note = sugar modification: lna; note = thymine
  modified_base 13: mod_base = OTHER; note = thymine; note = backbone modification: 5'-phosphorothioate; note = sugar modification: lna
  modified_base 14: mod_base = m5c; mod_base = OTHER; note = sugar modification: lna; note = backbone modification: 5'-phosphorothioate
  modified_base 15: mod_base = OTHER; note = backbone modification: 5'-phosphorothioate; note = sugar modification: lna
  modified_base 16: mod_base = OTHER; note = backbone modification: 5'-phosphorothioate; note = thymine; note = sugar modification: 2'-O-methoxyethylribose
  modified_base 17: mod_base = m5c; mod_base = OTHER; note = sugar modification: lna; note = backbone modification: 5'-phosphorothioate
  modified_base 18: mod_base = OTHER; mod_base = m5c; note = sugar modification: lna
tgttcttgtacttcatcc

SEQ ID NO: 694 - RNA, 18 nt, synthetic construct
  source 1..18: mol_type = other RNA; note = Antisense oligonucleotide
  modified_base 1: mod_base = OTHER; note = sugar modification: lna; note = backbone modification: 5'-phosphorothioate; note = thymine
  modified_base 2: mod_base = OTHER; note = backbone modification: 5'-phosphorothioate; note = sugar modification: lna
  modified_base 3: mod_base = OTHER; note = thymine; note = backbone modification: 5'-phosphorothioate; note = sugar modification: 2'-O-methoxyethylribose
  modified_base 4: mod_base = OTHER; note = thymine; note = sugar modification: 2'-O-methoxyethylribose; note = backbone modification: 5'-phosphorothioate
  modified_base 5: mod_base = m5c; mod_base = OTHER; note = sugar modification: 2'-O-methoxyethylribose; note = backbone modification: 5'-phosphorothioate
  modified_base 6: mod_base = OTHER; note = thymine; note = backbone modification: 5'-phosphorothioate; note = sugar modification: 2'-O-methoxyethylribose
  modified_base 7: mod_base = OTHER; note = backbone modification: 5'-phosphorothioate
  modified_base 8: mod_base = OTHER; note = backbone modification: 5'-phosphorothioate
  modified_base 9: mod_base = OTHER; note = backbone modification: 5'-phosphorothioate
  modified_base 10: mod_base = OTHER; note = backbone modification: 5'-phosphorothioate
  modified_base 11: mod_base = OTHER; note = backbone modification: 5'-phosphorothioate
  modified_base 12: mod_base = OTHER; note = backbone modification: 5'-phosphorothioate
  modified_base 13: mod_base = OTHER; note = backbone modification: 5'-phosphorothioate
  modified_base 14: mod_base = OTHER; note = backbone modification: 5'-phosphorothioate
  modified_base 15: mod_base = OTHER; note = backbone modification: 5'-phosphorothioate
  modified_base 16: mod_base = OTHER; note = sugar modification: 2'-O-methoxyethylribose; note = thymine; note = backbone modification: 5'-phosphorothioate
  modified_base 17: mod_base = m5c; mod_base = OTHER; note = backbone modification: 5'-phosphorothioate; note = sugar modification: lna
  modified_base 18: mod_base = m5c; mod_base = OTHER; note = sugar modification: lna
tgttcttgtacttcatcc

SEQ ID NO: 695 - RNA, 18 nt, synthetic construct
  source 1..18: mol_type = other RNA; note = Antisense oligonucleotide
  modified_base 1: mod_base = OTHER; note = sugar modification: 2'-O-methoxyethylribose; note = thymine; note = backbone modification: 5'-phosphorothioate
  modified_base 2: mod_base = OTHER; note = backbone modification: 5'-phosphorothioate; note = sugar modification: 2'-O-methoxyethylribose
  modified_base 3: mod_base = OTHER; note = backbone modification: 5'-phosphorothioate; note = sugar modification: 2'-O-methoxyethylribose; note = thymine
  modified_base 4: mod_base = OTHER; note = sugar modification: 2'-O-methoxyethylribose; note = thymine; note = backbone modification: 5'-phosphorothioate
  modified_base 5: mod_base = m5c; mod_base = OTHER; note = sugar modification: 2'-O-methoxyethylribose; note = backbone modification: 5'-phosphorothioate
  modified_base 6: mod_base = OTHER; note = sugar modification: 2'-O-methoxyethylribose; note = thymine; note = backbone modification: 5'-phosphorothioate
  modified_base 7: mod_base = OTHER; note = backbone modification: 5'-phosphorothioate
  modified_base 8: mod_base = OTHER; note = backbone modification: 5'-phosphorothioate
  modified_base 9: mod_base = OTHER; note = backbone modification: 5'-phosphorothioate
  modified_base 10: mod_base = OTHER; note = backbone modification: 5'-phosphorothioate
  modified_base 11: mod_base = OTHER; mod_base = m5c; note = sugar modification: 2'-O-methoxyethylribose; note = backbone modification: 5'-phosphorothioate
  modified_base 12: mod_base = OTHER; note = backbone modification: 5'-phosphorothioate
  modified_base 13: mod_base = OTHER; note = backbone modification: 5'-phosphorothioate
  modified_base 14: mod_base = OTHER; mod_base = m5c; note = sugar modification: 2'-O-methoxyethylribose; note = backbone modification: 5'-phosphorothioate
  modified_base 15: mod_base = OTHER; note = backbone modification: 5'-phosphorothioate
  modified_base 16: mod_base = OTHER; note = thymine; note = sugar modification: 2'-O-methoxyethylribose; note = backbone modification: 5'-phosphorothioate
  modified_base 17: mod_base = OTHER; mod_base = m5c; note = sugar modification: 2'-O-methoxyethylribose; note = backbone modification: 5'-phosphorothioate
  modified_base 18: mod_base = m5c; mod_base = OTHER; note = sugar modification: 2'-O-methoxyethylribose
tgttcttgtacttcatcc

SEQ ID NO: 696 - RNA, 18 nt, synthetic construct
  source 1..18: mol_type = other RNA; note = Antisense oligonucleotide
  modified_base 1: mod_base = OTHER; note = sugar modification: lna; note = backbone modification: 5'-phosphorothioate; note = thymine
  modified_base 2: mod_base = OTHER; note = backbone modification: 5'-phosphorothioate; note = sugar modification: lna
  modified_base 3: mod_base = OTHER; note = backbone modification: 5'-phosphorothioate; note = sugar modification: 2'-O-methoxyethylribose; note = thymine
  modified_base 4: mod_base = OTHER; note = thymine; note = backbone modification: 5'-phosphorothioate; note = sugar modification: 2'-O-methoxyethylribose
  modified_base 5: mod_base = m5c; mod_base = OTHER; note = sugar modification: 2'-O-methoxyethylribose; note = backbone modification: 5'-phosphorothioate
  modified_base 6: mod_base = OTHER; note = thymine; note = backbone modification: 5'-phosphorothioate; note = sugar modification: 2'-O-methoxyethylribose
  modified_base 7: mod_base = OTHER; note = backbone modification: 5'-phosphorothioate
  modified_base 8: mod_base = OTHER; note = backbone modification: 5'-phosphorothioate
  modified_base 9: mod_base = OTHER; note = backbone modification: 5'-phosphorothioate
  modified_base 10: mod_base = OTHER; note = backbone modification: 5'-phosphorothioate
  modified_base 11: mod_base = OTHER; mod_base = m5c; note = backbone modification: 5'-phosphorothioate; note = sugar modification: 2'-O-methoxyethylribose
  modified_base 12: mod_base = OTHER; note = backbone modification: 5'-phosphorothioate
  modified_base 13: mod_base = OTHER; note = backbone modification: 5'-phosphorothioate
  modified_base 14: mod_base = m5c; mod_base = OTHER; note = sugar modification: 2'-O-methoxyethylribose; note = backbone modification: 5'-phosphorothioate
  modified_base 15: mod_base = OTHER; note = backbone modification: 5'-phosphorothioate
  modified_base 16: mod_base = OTHER; note = thymine; note = backbone modification: 5'-phosphorothioate; note = sugar modification: 2'-O-methoxyethylribose
  modified_base 17: mod_base = m5c; mod_base = OTHER; note = sugar modification: lna; note = backbone modification: 5'-phosphorothioate
  modified_base 18: mod_base = m5c; mod_base = OTHER; note = sugar modification: lna
tgttcttgtacttcatcc

SEQ ID NO: 697 - RNA, 17 nt, synthetic construct
  source 1..17: mol_type = other RNA; note = Antisense oligonucleotide
  modified_base 1: mod_base = OTHER; note = backbone modification: 5'-phosphorothioate; note = sugar modification: lna
  modified_base 2: mod_base = OTHER; note = backbone modification: 5'-phosphorothioate; note = thymine; note = sugar modification: 2'-O-methoxyethylribose
  modified_base 3: mod_base = OTHER; note = sugar modification: 2'-O-methoxyethylribose; note = backbone modification: 5'-phosphorothioate; note = thymine
  modified_base 4: mod_base = OTHER; mod_base = m5c; note = sugar modification: 2'-O-methoxyethylribose; note = backbone modification: 5'-phosphorothioate
  modified_base 5: mod_base = OTHER; note = backbone modification: 5'-phosphorothioate; note = sugar modification: 2'-O-methoxyethylribose; note = thymine
  modified_base 6: mod_base = OTHER; note = sugar modification: 2'-O-methoxyethylribose; note = backbone modification: 5'-phosphorothioate; note = thymine
  modified_base 7: mod_base = OTHER; note = backbone modification: 5'-phosphorothioate; note = sugar modification: 2'-O-methoxyethylribose
  modified_base 8: mod_base = OTHER; note = backbone modification: 5'-phosphorothioate; note = sugar modification: 2'-O-methoxyethylribose; note = thymine
  modified_base 9: mod_base = OTHER; note = sugar modification: 2'-O-methoxyethylribose; note = backbone modification: 5'-phosphorothioate
  modified_base 10: mod_base = OTHER; mod_base = m5c; note = sugar modification: 2'-O-methoxyethylribose; note = backbone modification: 5'-phosphorothioate
  modified_base 11: mod_base = OTHER; note = sugar modification: 2'-O-methoxyethylribose; note = thymine; note = backbone modification: 5'-phosphorothioate
  modified_base 12: mod_base = OTHER; note = thymine; note = backbone modification: 5'-phosphorothioate; note = sugar modification: 2'-O-methoxyethylribose
  modified_base 13: mod_base = m5c; mod_base = OTHER; note = sugar modification: 2'-O-methoxyethylribose; note = backbone modification: 5'-phosphorothioate
  modified_base 14: mod_base = OTHER; note = sugar modification: 2'-O-methoxyethylribose; note = backbone modification: 5'-phosphorothioate
  modified_base 15: mod_base = OTHER; note = backbone modification: 5'-phosphorothioate; note = thymine; note = sugar modification: 2'-O-methoxyethylribose
  modified_base 16: mod_base = OTHER; mod_base = m5c; note = backbone modification: 5'-phosphorothioate; note = sugar modification: 2'-O-methoxyethylribose
  modified_base 17: mod_base = OTHER; mod_base = m5c; note = sugar modification: lna
gttcttgtacttcatcc

SEQ ID NO: 698 - RNA, 17 nt, synthetic construct
  source 1..17: mol_type = other RNA; note = Antisense oligonucleotide
  modified_base 1: mod_base = OTHER; note = backbone modification: 5'-phosphorothioate; note = sugar modification: lna
  modified_base 2: mod_base = OTHER; note = sugar modification: lna; note = backbone modification: 5'-phosphorothioate; note = thymine
  modified_base 3: mod_base = OTHER; note = thymine; note = sugar modification: 2'-O-methoxyethylribose; note = backbone modification: 5'-phosphorothioate
  modified_base 4: mod_base = m5c; mod_base = OTHER; note = sugar modification: 2'-O-methoxyethylribose; note = backbone modification: 5'-phosphorothioate
  modified_base 5: mod_base = OTHER; note = backbone modification: 5'-phosphorothioate; note = thymine; note = sugar modification: 2'-O-methoxyethylribose
  modified_base 6: mod_base = OTHER; note = backbone modification: 5'-phosphorothioate; note = sugar modification: 2'-O-methoxyethylribose; note = thymine
  modified_base 7: mod_base = OTHER; note = sugar modification: 2'-O-methoxyethylribose; note = backbone modification: 5'-phosphorothioate
  modified_base 8: mod_base = OTHER; note = thymine; note = sugar modification: 2'-O-methoxyethylribose; note = backbone modification: 5'-phosphorothioate
  modified_base 9: mod_base = OTHER; note = sugar modification: 2'-O-methoxyethylribose; note = backbone modification: 5'-phosphorothioate
  modified_base 10: mod_base = m5c; mod_base = OTHER; note = backbone modification: 5'-phosphorothioate; note = sugar modification: 2'-O-methoxyethylribose
  modified_base 11: mod_base = OTHER; note = sugar modification: 2'-O-methoxyethylribose; note = backbone modification: 5'-phosphorothioate; note = thymine
  modified_base 12: mod_base = OTHER; note = backbone modification: 5'-phosphorothioate; note = sugar modification: 2'-O-methoxyethylribose; note = thymine
  modified_base 13: mod_base = m5c; mod_base = OTHER; note = backbone modification: 5'-phosphorothioate; note = sugar modification: 2'-O-methoxyethylribose
  modified_base 14: mod_base = OTHER; note = sugar modification: 2'-O-methoxyethylribose; note = backbone modification: 5'-phosphorothioate
  modified_base 15: mod_base = OTHER; note = thymine; note = sugar modification: 2'-O-methoxyethylribose; note = backbone modification: 5'-phosphorothioate
  modified_base 16: mod_base = OTHER; mod_base = m5c; note = backbone modification: 5'-phosphorothioate; note = sugar modification: lna
  modified_base 17: mod_base = OTHER; mod_base = m5c; note = sugar modification: lna
gttcttgtacttcatcc

SEQ ID NO: 699 - RNA, 17 nt, synthetic construct
  source 1..17: mol_type = other RNA; note = Antisense oligonucleotide
  modified_base 1: mod_base = OTHER; note = backbone modification: 5'-phosphorothioate; note = sugar modification: lna
  modified_base 2: mod_base = OTHER; note = sugar modification: 2'-O-methoxyethylribose; note = backbone modification: 5'-phosphorothioate; note = thymine
  modified_base 3: mod_base = OTHER; note = thymine; note = sugar modification: 2'-O-methoxyethylribose; note = backbone modification: 5'-phosphorothioate
  modified_base 4: mod_base = OTHER; mod_base = m5c; note = backbone modification: 5'-phosphorothioate; note = sugar modification: 2'-O-methoxyethylribose
  modified_base 5: mod_base = OTHER; note = thymine; note = sugar modification: 2'-O-methoxyethylribose; note = backbone modification: 5'-phosphorothioate
  modified_base 6: mod_base = OTHER; note = thymine; note = backbone modification: 5'-phosphorothioate; note = sugar modification: 2'-O-methoxyethylribose
  modified_base 7: mod_base = OTHER; note = sugar modification: 2'-O-methoxyethylribose; note = backbone modification: 5'-phosphorothioate
  modified_base 8: mod_base = OTHER; note = thymine; note = sugar modification: 2'-O-methoxyethylribose; note = backbone modification: 5'-phosphorothioate
  modified_base 9: mod_base = OTHER; note = backbone modification: 5'-phosphorothioate; note = sugar modification: 2'-O-methoxyethylribose
  modified_base 10: mod_base = m5c; mod_base = OTHER; note = backbone modification: 5'-phosphorothioate; note = sugar modification: 2'-O-methoxyethylribose
  modified_base 11: mod_base = OTHER; note = thymine; note = backbone modification: 5'-phosphorothioate; note = sugar modification: 2'-O-methoxyethylribose
  modified_base 12: mod_base = OTHER; note = backbone modification: 5'-phosphorothioate; note = sugar modification: 2'-O-methoxyethylribose; note = thymine
  modified_base 13: mod_base = OTHER; mod_base = m5c; note = backbone modification: 5'-phosphorothioate; note = sugar modification: 2'-O-methoxyethylribose
  modified_base 14: mod_base = OTHER; note = backbone modification: 5'-phosphorothioate; note = sugar modification: 2'-O-methoxyethylribose
  modified_base 15: mod_base = OTHER; note = sugar modification: 2'-O-methoxyethylribose; note = backbone modification: 5'-phosphorothioate; note = thymine
  modified_base 16: mod_base = m5c; mod_base = OTHER; note = sugar modification: lna; note = backbone modification: 5'-phosphorothioate
  modified_base 17: mod_base = m5c; mod_base = OTHER; note = sugar modification: lna
gttcttgtacttcatcc

SEQ ID NO: 700 - RNA, 17 nt, synthetic construct
  source 1..17: mol_type = other RNA; note = Antisense oligonucleotide
  modified_base 1: mod_base = OTHER; note = sugar modification: lna; note = backbone modification: 5'-phosphorothioate
  modified_base 2: mod_base = OTHER; note = sugar modification: lna; note = thymine; note = backbone modification: 5'-phosphorothioate
  modified_base 3: mod_base = OTHER; note = backbone modification: 5'-phosphorothioate; note = thymine; note = sugar modification: 2'-O-methoxyethylribose
  modified_base 4: mod_base = m5c; mod_base = OTHER; note = sugar modification: 2'-O-methoxyethylribose; note = backbone modification: 5'-phosphorothioate
  modified_base 5: mod_base = OTHER; note = backbone modification: 5'-phosphorothioate; note = thymine; note = sugar modification: 2'-O-methoxyethylribose
  modified_base 6: mod_base = OTHER; note = sugar modification: 2'-O-methoxyethylribose; note = thymine; note = backbone modification: 5'-phosphorothioate
  modified_base 7: mod_base = OTHER; note = sugar modification: 2'-O-methoxyethylribose; note = backbone modification: 5'-phosphorothioate
  modified_base 8: mod_base = OTHER; note = backbone modification: 5'-phosphorothioate; note = thymine; note = sugar modification: 2'-O-methoxyethylribose
  modified_base 9: mod_base = OTHER; note = sugar modification: 2'-O-methoxyethylribose; note = backbone modification: 5'-phosphorothioate
  modified_base 10: mod_base = OTHER; mod_base = m5c; note = backbone modification: 5'-phosphorothioate; note = sugar modification: 2'-O-methoxyethylribose
  modified_base 11: mod_base = OTHER; note = thymine; note = backbone modification: 5'-phosphorothioate; note = sugar modification: 2'-O-methoxyethylribose
  modified_base 12: mod_base = OTHER; note = sugar modification: 2'-O-methoxyethylribose; note = backbone modification: 5'-phosphorothioate; note = thymine
  modified_base 13: mod_base = OTHER; mod_base = m5c; note = backbone modification: 5'-phosphorothioate; note = sugar modification: 2'-O-methoxyethylribose
  modified_base 14: mod_base = OTHER; note = sugar modification: 2'-O-methoxyethylribose; note = backbone modification: 5'-phosphorothioate
  modified_base 15: mod_base = OTHER; note = thymine; note = backbone modification: 5'-phosphorothioate; note = sugar modification: 2'-O-methoxyethylribose
  modified_base 16: mod_base = m5c; mod_base = OTHER; note = backbone modification: 5'-phosphorothioate; note = sugar modification: 2'-O-methoxyethylribose
  modified_base 17: mod_base = m5c; mod_base = OTHER; note = sugar modification: lna
gttcttgtacttcatcc

SEQ ID NO: 701 - RNA, 17 nt, synthetic construct
  source 1..17: mol_type = other RNA; note = Antisense oligonucleotide
  modified_base 1: mod_base = OTHER; note = sugar modification: 2'-O-methoxyethylribose; note = backbone modification: 5'-phosphorothioate
  modified_base 2: mod_base = OTHER; note = thymine; note = backbone modification: 5'-phosphorothioate; note = sugar modification: 2'-O-methoxyethylribose
  modified_base 3: mod_base = OTHER; note = thymine; note = backbone modification: 5'-phosphorothioate; note = sugar modification: lna
  modified_base 4: mod_base = m5c; mod_base = OTHER; note = sugar modification: lna; note = backbone modification: 5'-phosphorothioate
  modified_base 5: mod_base = OTHER; note = backbone modification: 5'-phosphorothioate; note = thymine; note = sugar modification: 2'-O-methoxyethylribose
  modified_base 6: mod_base = OTHER; note = sugar modification: 2'-O-methoxyethylribose; note = thymine; note = backbone modification: 5'-phosphorothioate
  modified_base 7: mod_base = OTHER; note = backbone modification: 5'-phosphorothioate; note = sugar modification: 2'-O-methoxyethylribose
  modified_base 8: mod_base = OTHER; note = sugar modification: 2'-O-methoxyethylribose; note = thymine; note = backbone modification: 5'-phosphorothioate
  modified_base 9: mod_base = OTHER; note = sugar modification: 2'-O-methoxyethylribose; note = backbone modification: 5'-phosphorothioate
  modified_base 10: mod_base = m5c; mod_base = OTHER; note = backbone modification: 5'-phosphorothioate; note = sugar modification: 2'-O-methoxyethylribose
  modified_base 11: mod_base = OTHER; note = thymine; note = sugar modification: 2'-O-methoxyethylribose; note = backbone modification: 5'-phosphorothioate
  modified_base 12: mod_base = OTHER; note = thymine; note = sugar modification: 2'-O-methoxyethylribose; note = backbone modification: 5'-phosphorothioate
  modified_base 13: mod_base = m5c; mod_base = OTHER; note = sugar modification: 2'-O-methoxyethylribose; note = backbone modification: 5'-phosphorothioate
  modified_base 14: mod_base = OTHER; note = sugar modification: lna; note = backbone modification: 5'-phosphorothioate
  modified_base 15: mod_base = OTHER; note = sugar modification: lna; note = thymine; note = backbone modification: 5'-phosphorothioate
  modified_base 16: mod_base = OTHER; mod_base = m5c; note = backbone modification: 5'-phosphorothioate; note = sugar modification: 2'-O-methoxyethylribose
  modified_base 17: mod_base = m5c; mod_base = OTHER; note = sugar modification: 2'-O-methoxyethylribose
gttcttgtacttcatcc

SEQ ID NO: 702 - RNA, 17 nt, synthetic construct
  source 1..17: mol_type = other RNA; note = Antisense oligonucleotide
  modified_base 1: mod_base = OTHER; note = sugar modification: 2'-O-methoxyethylribose; note = backbone modification: 5'-phosphorothioate
  modified_base 2: mod_base = OTHER; note = thymine; note = backbone modification: 5'-phosphorothioate; note = sugar modification: 2'-O-methoxyethylribose
  modified_base 3: mod_base = OTHER; note = backbone modification: 5'-phosphorothioate; note = sugar modification: 2'-O-methoxyethylribose; note = thymine
  modified_base 4: mod_base = m5c; mod_base = OTHER; note = backbone modification: 5'-phosphorothioate; note = sugar modification: 2'-O-methoxyethylribose
  modified_base 5: mod_base = OTHER; note = sugar modification: lna; note = backbone modification: 5'-phosphorothioate; note = thymine
  modified_base 6: mod_base = OTHER; note = backbone modification: 5'-phosphorothioate; note = thymine; note = sugar modification: lna
  modified_base 7: mod_base = OTHER; note = backbone modification: 5'-phosphorothioate; note = sugar modification: 2'-O-methoxyethylribose
  modified_base 8: mod_base = OTHER; note = backbone modification: 5'-phosphorothioate; note = sugar modification: 2'-O-methoxyethylribose; note = thymine
  modified_base 9: mod_base = OTHER; note = backbone modification: 5'-phosphorothioate; note = sugar modification: 2'-O-methoxyethylribose
  modified_base 10: mod_base = OTHER; mod_base = m5c; note = sugar modification: 2'-O-methoxyethylribose; note = backbone modification: 5'-phosphorothioate
  modified_base 11: mod_base = OTHER; note = sugar modification: 2'-O-methoxyethylribose; note = thymine; note = backbone modification: 5'-phosphorothioate
  modified_base 12: mod_base = OTHER; note = sugar modification: lna; note = backbone modification: 5'-phosphorothioate; note = thymine
  modified_base 13: mod_base = m5c; mod_base = OTHER; note = backbone modification: 5'-phosphorothioate; note = sugar modification: lna
  modified_base 14: mod_base = OTHER; note = backbone modification: 5'-phosphorothioate; note = sugar modification: 2'-O-methoxyethylribose
  modified_base 15: mod_base = OTHER; note = thymine; note = backbone modification: 5'-phosphorothioate; note = sugar modification: 2'-O-methoxyethylribose
  modified_base 16: mod_base = m5c; mod_base = OTHER; note = sugar modification: 2'-O-methoxyethylribose; note = backbone modification: 5'-phosphorothioate
  modified_base 17: mod_base = OTHER; mod_base = m5c; note = sugar modification: 2'-O-methoxyethylribose
gttcttgtacttcatcc

SEQ ID NO: 703 - RNA, 17 nt, synthetic construct
  source 1..17: mol_type = other RNA; note = Antisense oligonucleotide
  modified_base 1: mod_base = OTHER; note = sugar modification: 2'-O-methoxyethylribose; note = backbone modification: 5'-phosphorothioate
  modified_base 2: mod_base = OTHER; note = thymine; note = backbone modification: 5'-phosphorothioate; note = sugar modification: 2'-O-methoxyethylribose
  modified_base 3: mod_base = OTHER; note = backbone modification: 5'-phosphorothioate; note = thymine; note = sugar modification: 2'-O-methoxyethylribose
  modified_base 4: mod_base = OTHER; mod_base = m5c; note = sugar modification: 2'-O-methoxyethylribose; note = backbone modification: 5'-phosphorothioate
  modified_base 5: mod_base = OTHER; note = backbone modification: 5'-phosphorothioate; note = sugar modification: 2'-O-methoxyethylribose; note = thymine
  modified_base 6: mod_base = OTHER; note = backbone modification: 5'-phosphorothioate; note = sugar modification: 2'-O-methoxyethylribose; note = thymine
  modified_base 7: mod_base = OTHER; note = backbone modification: 5'-phosphorothioate; note = sugar modification: lna
  modified_base 8: mod_base = OTHER; note = sugar modification: lna; note = thymine; note = backbone modification: 5'-phosphorothioate
  modified_base 9: mod_base = OTHER; note = backbone modification: 5'-phosphorothioate; note = sugar modification: 2'-O-methoxyethylribose
  modified_base 10: mod_base = OTHER; mod_base = m5c; note = sugar modification: lna; note = backbone modification: 5'-phosphorothioate
  modified_base 11: mod_base = OTHER; note = sugar modification: lna; note = thymine; note = backbone modification: 5'-phosphorothioate
  modified_base 12: mod_base = OTHER; note = sugar modification: 2'-O-methoxyethylribose; note = backbone modification: 5'-phosphorothioate; note = thymine
  modified_base 13: mod_base = m5c; mod_base = OTHER; note = backbone modification: 5'-phosphorothioate; note = sugar modification: 2'-O-methoxyethylribose
  modified_base 14: mod_base = OTHER; note = backbone modification: 5'-phosphorothioate; note = sugar modification: 2'-O-methoxyethylribose
  modified_base 15: mod_base = OTHER; note = backbone modification: 5'-phosphorothioate; note = sugar modification: 2'-O-methoxyethylribose; note = thymine
  modified_base 16: mod_base = OTHER; mod_base = m5c; note = sugar modification: 2'-O-methoxyethylribose; note = backbone modification: 5'-phosphorothioate
  modified_base 17: mod_base = m5c; mod_base = OTHER; note = sugar modification: 2'-O-methoxyethylribose
gttcttgtacttcatcc

SEQ ID NO: 704 - RNA, 17 nt, synthetic construct
  source 1..17: mol_type = other RNA; note = Antisense oligonucleotide
  modified_base 1: mod_base = OTHER; note = sugar modification: 2'-O-methoxyethylribose; note = backbone modification: 5'-phosphorothioate
  modified_base 2: mod_base = OTHER; note = backbone modification: 5'-phosphorothioate; note = thymine; note = sugar modification: 2'-O-methoxyethylribose
  modified_base 3: mod_base = OTHER; note = backbone modification: 5'-phosphorothioate; note = thymine; note = sugar modification: 2'-O-methoxyethylribose
  modified_base 4: mod_base = OTHER; mod_base = m5c; note = backbone modification: 5'-phosphorothioate; note = sugar modification: 2'-O-methoxyethylribose
  modified_base 5: mod_base = OTHER; note = sugar modification: lna; note = backbone modification: 5'-phosphorothioate; note = thymine
  modified_base 6: mod_base = OTHER; note = sugar modification: lna; note = backbone modification: 5'-phosphorothioate; note = thymine
  modified_base 7: mod_base = OTHER; note = sugar modification: 2'-O-methoxyethylribose; note = backbone modification: 5'-phosphorothioate
  modified_base 8: mod_base = OTHER; note = thymine; note = sugar modification: lna; note = backbone modification: 5'-phosphorothioate
  modified_base 9: mod_base = OTHER; note = backbone modification: 5'-phosphorothioate; note = sugar modification: lna
  modified_base 10: mod_base = OTHER; mod_base = m5c; note = backbone modification: 5'-phosphorothioate; note = sugar modification: 2'-O-methoxyethylribose
  modified_base 11: mod_base = OTHER; note = thymine; note = backbone modification: 5'-phosphorothioate; note = sugar modification: 2'-O-methoxyethylribose
  modified_base 12: mod_base = OTHER; note = sugar modification: 2'-O-methoxyethylribose; note = thymine; note = backbone modification: 5'-phosphorothioate
  modified_base 13: mod_base = OTHER; mod_base = m5c; note = backbone modification: 5'-phosphorothioate; note = sugar modification: 2'-O-methoxyethylribose
  modified_base 14: mod_base = OTHER; note = sugar modification: 2'-O-methoxyethylribose; note = backbone modification: 5'-phosphorothioate
  modified_base 15: mod_base = OTHER; note = backbone modification: 5'-phosphorothioate; note = thymine; note = sugar modification: 2'-O-methoxyethylribose
  modified_base 16: mod_base = m5c; mod_base = OTHER; note = backbone modification: 5'-phosphorothioate; note = sugar modification: 2'-O-methoxyethylribose
  modified_base 17: mod_base = OTHER; mod_base = m5c; note = sugar modification: 2'-O-methoxyethylribose
gttcttgtacttcatcc

SEQ ID NO: 705 - RNA, 17 nt, synthetic construct
  source 1..17: mol_type = other RNA; note = Antisense oligonucleotide
  modified_base 1: mod_base = OTHER; note = backbone modification: 5'-phosphorothioate; note = sugar modification: 2'-O-methoxyethylribose
  modified_base 2: mod_base = OTHER; note = sugar modification: 2'-O-methoxyethylribose; note = thymine; note = backbone modification: 5'-phosphorothioate
  modified_base 3: mod_base = OTHER; note = thymine; note = sugar modification: 2'-O-methoxyethylribose; note = backbone modification: 5'-phosphorothioate
  modified_base 4: mod_base = OTHER; mod_base = m5c; note = sugar modification: 2'-O-methoxyethylribose; note = backbone modification: 5'-phosphorothioate
  modified_base 5: mod_base = OTHER; note = backbone modification: 5'-phosphorothioate; note = sugar modification: lna; note = thymine
  modified_base 6: mod_base = OTHER; note = backbone modification: 5'-phosphorothioate; note = thymine; note = sugar modification: lna
  modified_base 7: mod_base = OTHER; note = sugar modification: 2'-O-methoxyethylribose; note = backbone modification: 5'-phosphorothioate
  modified_base 8: mod_base = OTHER; note = thymine; note = backbone modification: 5'-phosphorothioate; note = sugar modification: 2'-O-methoxyethylribose
  modified_base 9: mod_base = OTHER; note = sugar modification: 2'-O-methoxyethylribose; note = backbone modification: 5'-phosphorothioate
  modified_base 10: mod_base = m5c; mod_base = OTHER; note = sugar modification: 2'-O-methoxyethylribose; note = backbone modification: 5'-phosphorothioate
  modified_base 11: mod_base = OTHER; note = backbone modification: 5'-phosphorothioate; note = sugar modification: lna; note = thymine
  modified_base 12: mod_base = OTHER; note = backbone modification: 5'-phosphorothioate; note = thymine; note = sugar modification: lna
  modified_base 13: mod_base = OTHER; mod_base = m5c; note = sugar modification: 2'-O-methoxyethylribose; note = backbone modification: 5'-phosphorothioate
  modified_base 14: mod_base = OTHER; note = backbone modification: 5'-phosphorothioate; note = sugar modification: 2'-O-methoxyethylribose
  modified_base 15: mod_base = OTHER; note = sugar modification: 2'-O-methoxyethylribose; note = backbone modification: 5'-phosphorothioate; note = thymine
  modified_base 16: mod_base = m5c; mod_base = OTHER; note = backbone modification: 5'-phosphorothioate; note = sugar modification: 2'-O-methoxyethylribose
  modified_base 17: mod_base = OTHER; mod_base = m5c; note = sugar modification: 2'-O-methoxyethylribose
gttcttgtacttcatcc

SEQ ID NO: 706 - RNA, 17 nt, synthetic construct
  source 1..17: mol_type = other RNA; note = Antisense oligonucleotide
  modified_base 1: mod_base = OTHER; note = backbone modification: 5'-phosphorothioate; note = sugar modification: 2'-O-methoxyethylribose
  modified_base 2: mod_base = OTHER; note = sugar modification: 2'-O-methoxyethylribose; note = thymine; note = backbone modification: 5'-phosphorothioate
  modified_base 3: mod_base = OTHER; note = sugar modification: 2'-O-methoxyethylribose; note = thymine; note = backbone modification: 5'-phosphorothioate
  modified_base 4: mod_base = m5c; mod_base = OTHER; note = backbone modification: 5'-phosphorothioate; note = sugar modification: 2'-O-methoxyethylribose
  modified_base 5: mod_base = OTHER; note = thymine; note = backbone modification: 5'-phosphorothioate; note = sugar modification: lna
  modified_base 6: mod_base = OTHER; note = thymine; note = sugar modification: lna; note = backbone modification: 5'-phosphorothioate
  modified_base 7: mod_base = OTHER; note = backbone modification: 5'-phosphorothioate; note = sugar modification: 2'-O-methoxyethylribose
  modified_base 8: mod_base = OTHER; note = thymine; note = backbone modification: 5'-phosphorothioate; note = sugar modification: 2'-O-methoxyethylribose
  modified_base 9: mod_base = OTHER; note = backbone modification: 5'-phosphorothioate; note = sugar modification: 2'-O-methoxyethylribose
  modified_base 10: mod_base = OTHER; mod_base = m5c; note = backbone modification: 5'-phosphorothioate; note = sugar modification: 2'-O-methoxyethylribose
  modified_base 11: mod_base = OTHER; note = sugar modification: 2'-O-methoxyethylribose; note = thymine; note = backbone modification: 5'-phosphorothioate
  modified_base 12: mod_base = OTHER; note = sugar modification: 2'-O-methoxyethylribose; note = thymine; note = backbone modification: 5'-phosphorothioate
  modified_base 13: mod_base = OTHER; mod_base = m5c; note = backbone modification: 5'-phosphorothioate; note = sugar modification: 2'-O-methoxyethylribose
  modified_base 14: mod_base = OTHER; note = backbone modification: 5'-phosphorothioate; note = sugar modification: lna
  modified_base 15: mod_base = OTHER; note = backbone modification: 5'-phosphorothioate; note = sugar modification: lna; note = thymine
  modified_base 16: mod_base = m5c; mod_base = OTHER; note = backbone modification: 5'-phosphorothioate; note = sugar modification: 2'-O-methoxyethylribose
  modified_base 17: mod_base = OTHER; mod_base = m5c; note = sugar modification: 2'-O-methoxyethylribose
gttcttgtacttcatcc

SEQ ID NO: 707 - RNA, 17 nt, synthetic construct
  source 1..17: mol_type = other RNA; note = Antisense oligonucleotide
  modified_base 1: mod_base = OTHER; note = backbone modification: 5'-phosphorothioate; note = sugar modification: 2'-O-methoxyethylribose
  modified_base 2: mod_base = OTHER; note = backbone modification: 5'-phosphorothioate; note = sugar modification: 2'-O-methoxyethylribose; note = thymine
  modified_base 3: mod_base = OTHER; note = thymine; note = backbone modification: 5'-phosphorothioate; note = sugar modification: 2'-O-methoxyethylribose
  modified_base 4: mod_base = OTHER; mod_base = m5c; note = sugar modification: 2'-O-methoxyethylribose; note = backbone modification: 5'-phosphorothioate
  modified_base 5: mod_base = OTHER; note = sugar modification: 2'-O-methoxyethylribose; note = thymine; note = backbone modification: 5'-phosphorothioate
  modified_base 6: mod_base = OTHER; note = thymine; note = sugar modification: 2'-O-methoxyethylribose; note = backbone modification: 5'-phosphorothioate
  modified_base 7: mod_base = OTHER; note = backbone modification: 5'-phosphorothioate; note = sugar modification: 2'-O-methoxyethylribose
  modified_base 8: mod_base = OTHER; note = thymine; note = sugar modification: lna; note = backbone modification: 5'-phosphorothioate
  modified_base 9: mod_base = OTHER; note = backbone modification: 5'-phosphorothioate; note = sugar modification: lna
  modified_base 10: mod_base = OTHER; mod_base = m5c; note = backbone modification: 5'-phosphorothioate; note = sugar modification: 2'-O-methoxyethylribose
  modified_base 11: mod_base = OTHER; note = thymine; note = sugar modification: lna; note = backbone modification: 5'-phosphorothioate
  modified_base 12: mod_base = OTHER; note = sugar modification: lna; note = thymine; note = backbone modification: 5'-phosphorothioate
  modified_base 13: mod_base = OTHER; mod_base = m5c; note = sugar modification: 2'-O-methoxyethylribose; note = backbone modification: 5'-phosphorothioate
  modified_base 14: mod_base = OTHER; note = backbone modification: 5'-phosphorothioate; note = sugar modification: 2'-O-methoxyethylribose
  modified_base 15: mod_base = OTHER; note = thymine; note = backbone modification: 5'-phosphorothioate; note = sugar modification: 2'-O-methoxyethylribose
  modified_base 16: mod_base = m5c; mod_base = OTHER; note = backbone modification: 5'-phosphorothioate; note = sugar modification: 2'-O-methoxyethylribose
  modified_base 17: mod_base = OTHER; mod_base = m5c; note = sugar modification: 2'-O-methoxyethylribose
gttcttgtacttcatcc

SEQ ID NO: 708 - RNA, 17 nt, synthetic construct
  source 1..17: mol_type = other RNA; note = Antisense oligonucleotide
  modified_base 1: mod_base = OTHER; note = sugar modification: 2'-O-methoxyethylribose; note = backbone modification: 5'-phosphorothioate
  modified_base 2: mod_base = OTHER; note = thymine; note = sugar modification: 2'-O-methoxyethylribose; note = backbone modification: 5'-phosphorothioate
  modified_base 3: mod_base = OTHER; note = backbone modification: 5'-phosphorothioate; note = thymine; note = sugar modification: 2'-O-methoxyethylribose
  modified_base 4: mod_base = m5c; mod_base = OTHER; note = backbone modification: 5'-phosphorothioate; note = sugar modification: 2'-O-methoxyethylribose
  modified_base 5: mod_base = OTHER; note = backbone modification: 5'-phosphorothioate; note = thymine; note = sugar modification: 2'-O-methoxyethylribose
  modified_base 6: mod_base = OTHER; note = thymine; note = sugar modification: 2'-O-methoxyethylribose; note = backbone modification: 5'-phosphorothioate
  modified_base 7: mod_base = OTHER; note = sugar modification: 2'-O-methoxyethylribose; note = backbone modification: 5'-phosphorothioate
  modified_base 8: mod_base = OTHER; note = sugar modification: lna; note = thymine; note = backbone modification: 5'-phosphorothioate
  modified_base 9: mod_base = OTHER; note = backbone modification: 5'-phosphorothioate; note = sugar modification: lna
  modified_base 10: mod_base = m5c; mod_base = OTHER; note = backbone modification: 5'-phosphorothioate; note = sugar modification: 2'-O-methoxyethylribose
  modified_base 11: mod_base = OTHER; note = backbone modification: 5'-phosphorothioate; note = thymine; note = sugar modification: 2'-O-methoxyethylribose
  modified_base 12: mod_base = OTHER; note = sugar modification: 2'-O-methoxyethylribose; note = backbone modification: 5'-phosphorothioate; note = thymine
  modified_base 13: mod_base = OTHER; mod_base = m5c; note = backbone modification: 5'-phosphorothioate; note = sugar modification: 2'-O-methoxyethylribose
  modified_base 14: mod_base = OTHER; note = backbone modification: 5'-phosphorothioate; note = sugar modification: lna
  modified_base 15: mod_base = OTHER; note = thymine; note = sugar modification: lna; note = backbone modification: 5'-phosphorothioate
  modified_base 16: mod_base = m5c; mod_base = OTHER; note = sugar modification: 2'-O-methoxyethylribose; note = backbone modification: 5'-phosphorothioate
  modified_base 17: mod_base = OTHER; mod_base = m5c; note = sugar modification: 2'-O-methoxyethylribose
gttcttgtacttcatcc

SEQ ID NO: 709 - RNA, 17 nt, synthetic construct
  source 1..17: mol_type = other RNA; note = Antisense oligonucleotide
  modified_base 1: mod_base = OTHER; note = sugar modification: 2'-O-methoxyethylribose; note = backbone modification: 5'-phosphorothioate
  modified_base 2: mod_base = OTHER; note = backbone modification: 5'-phosphorothioate; note = thymine; note = sugar modification: 2'-O-methoxyethylribose
  modified_base 3: mod_base = OTHER; note = sugar modification: 2'-O-methoxyethylribose; note = backbone modification: 5'-phosphorothioate; note = thymine
  modified_base 4: mod_base = OTHER; mod_base = m5c; note = backbone modification: 5'-phosphorothioate; note = sugar modification: 2'-O-methoxyethylribose
  modified_base 5: mod_base = OTHER; note = thymine; note = sugar modification: 2'-O-methoxyethylribose; note = backbone modification: 5'-phosphorothioate
  modified_base 6: mod_base = OTHER; note = backbone modification: 5'-phosphorothioate; note = sugar modification: 2'-O-methoxyethylribose; note = thymine
  modified_base 7: mod_base = OTHER; note = backbone modification: 5'-phosphorothioate; note = sugar modification: 2'-O-methoxyethylribose
  modified_base 8: mod_base = OTHER; note = sugar modification: 2'-O-methoxyethylribose; note = backbone modification: 5'-phosphorothioate; note = thymine
  modified_base 9: mod_base = OTHER; note = sugar modification: 2'-O-methoxyethylribose; note = backbone modification: 5'-phosphorothioate
  modified_base 10: mod_base = m5c; mod_base = OTHER; note = sugar modification: 2'-O-methoxyethylribose; note = backbone modification: 5'-phosphorothioate
  modified_base 11: mod_base = OTHER; note = backbone modification: 5'-phosphorothioate; note = sugar modification: lna; note = thymine
  modified_base 12: mod_base = OTHER; note = backbone modification: 5'-phosphorothioate; note = sugar modification: lna; note = thymine
  modified_base 13: mod_base = m5c; mod_base = OTHER; note = sugar modification: 2'-O-methoxyethylribose; note = backbone modification: 5'-phosphorothioate
  modified_base 14: mod_base = OTHER; note = sugar modification: lna; note = backbone modification: 5'-phosphorothioate
  modified_base 15: mod_base = OTHER; note = backbone modification: 5'-phosphorothioate; note = thymine; note = sugar modification: lna
  modified_base 16: mod_base = OTHER; mod_base = m5c; note = backbone modification: 5'-phosphorothioate; note = sugar modification: 2'-O-methoxyethylribose
  modified_base 17: mod_base = OTHER; mod_base = m5c; note = sugar modification: 2'-O-methoxyethylribose
gttcttgtacttcatcc

SEQ ID NO: 710 - RNA, 17 nt, synthetic construct
  source 1..17: mol_type = other RNA; note = Antisense oligonucleotide
  modified_base 1: mod_base = OTHER; note = backbone modification: 5'-phosphorothioate; note = sugar modification: 2'-O-methoxyethylribose
  modified_base 2: mod_base = OTHER; note = backbone modification: 5'-phosphorothioate; note = thymine; note = sugar modification: 2'-O-methoxyethylribose
  modified_base 3: mod_base = OTHER; note = sugar modification: lna; note = backbone modification: 5'-phosphorothioate; note = thymine
  modified_base 4: mod_base = OTHER; mod_base = m5c; note = sugar modification: lna; note = backbone modification: 5'-phosphorothioate
  modified_base 5: mod_base = OTHER; note = thymine; note = sugar modification: 2'-O-methoxyethylribose; note = backbone modification: 5'-phosphorothioate
  modified_base 6: mod_base = OTHER; note = thymine; note = backbone modification: 5'-phosphorothioate; note = sugar modification: lna
  modified_base 7: mod_base = OTHER; note = backbone modification: 5'-phosphorothioate; note = sugar modification: 2'-O-methoxyethylribose
  modified_base 8: mod_base = OTHER; note = backbone modification: 5'-phosphorothioate; note = thymine; note = sugar modification: 2'-O-methoxyethylribose
  modified_base 9: mod_base = OTHER; note = backbone modification: 5'-phosphorothioate; note = sugar modification: 2'-O-methoxyethylribose
  modified_base 10: mod_base = OTHER; mod_base = m5c; note = backbone modification: 5'-phosphorothioate; note = sugar modification: 2'-O-methoxyethylribose
  modified_base 11: mod_base = OTHER; note = thymine; note = backbone modification: 5'-phosphorothioate; note = sugar modification: 2'-O-methoxyethylribose
  modified_base 12: mod_base = OTHER; note = sugar modification: 2'-O-methoxyethylribose; note = thymine; note = backbone modification: 5'-phosphorothioate
  modified_base 13: mod_base = OTHER; mod_base = m5c; note = sugar modification: 2'-O-methoxyethylribose; note = backbone modification: 5'-phosphorothioate
  modified_base 14: mod_base = OTHER; note = backbone modification: 5'-phosphorothioate; note = sugar modification: 2'-O-methoxyethylribose
  modified_base 15: mod_base = OTHER; note = backbone modification: 5'-phosphorothioate; note = sugar modification: 2'-O-methoxyethylribose; note = thymine
  modified_base 16: mod_base = OTHER; mod_base = m5c; note = backbone modification: 5'-phosphorothioate; note = sugar modification: 2'-O-methoxyethylribose
  modified_base 17: mod_base = OTHER; mod_base = m5c; note = sugar modification: 2'-O-methoxyethylribose
gttcttgtacttcatcc

SEQ ID NO: 711 - RNA, 17 nt, synthetic construct
  source 1..17: mol_type = other RNA; note = Antisense oligonucleotide
  modified_base 1: mod_base = OTHER; note = sugar modification: lna; note = backbone modification: 5'-phosphorothioate
  modified_base 2: mod_base = OTHER; note = thymine; note = backbone modification: 5'-phosphorothioate; note = sugar modification: 2'-O-methoxyethylribose
  modified_base 3: mod_base = OTHER; note = backbone modification: 5'-phosphorothioate; note = sugar modification: lna; note = thymine
  modified_base 4: mod_base = m5c; mod_base = OTHER; note = sugar modification: 2'-O-methoxyethylribose; note = backbone modification: 5'-phosphorothioate
  modified_base 5: mod_base = OTHER; note = sugar modification: 2'-O-methoxyethylribose; note = backbone modification: 5'-phosphorothioate; note = thymine
  modified_base 6: mod_base = OTHER; note = sugar modification: 2'-O-methoxyethylribose; note = thymine; note = backbone modification: 5'-phosphorothioate
  modified_base 7: mod_base = OTHER; note = backbone modification: 5'-phosphorothioate; note = sugar modification: 2'-O-methoxyethylribose
  modified_base 8: mod_base = OTHER; note = backbone modification: 5'-phosphorothioate; note = thymine; note = sugar modification: 2'-O-methoxyethylribose
  modified_base 9: mod_base = OTHER; note = backbone modification: 5'-phosphorothioate; note = sugar modification: 2'-O-methoxyethylribose
  modified_base 10: mod_base = OTHER; mod_base = m5c; note = backbone modification: 5'-phosphorothioate; note = sugar modification: 2'-O-methoxyethylribose
  modified_base 11: mod_base = OTHER; note = backbone modification: 5'-phosphorothioate; note = thymine; note = sugar modification: 2'-O-methoxyethylribose
  modified_base 12: mod_base = OTHER; note = backbone modification: 5'-phosphorothioate; note = sugar modification: 2'-O-methoxyethylribose; note = thymine
  modified_base 13: mod_base = OTHER; mod_base = m5c; note = backbone modification: 5'-phosphorothioate; note = sugar modification: 2'-O-methoxyethylribose
  modified_base 14: mod_base = OTHER; note = sugar modification: 2'-O-methoxyethylribose; note = backbone modification: 5'-phosphorothioate
  modified_base 15: mod_base = OTHER; note = thymine; note = sugar modification: 2'-O-methoxyethylribose; note = backbone modification: 5'-phosphorothioate
  modified_base 16: mod_base = m5c; mod_base = OTHER; note = backbone modification: 5'-phosphorothioate; note = sugar modification: lna
  modified_base 17: mod_base = m5c; mod_base = OTHER; note = sugar modification: 2'-O-methoxyethylribose
gttcttgtacttcatcc

SEQ ID NO: 712 - RNA, 17 nt, synthetic construct
  source 1..17: mol_type = other RNA; note = Antisense oligonucleotide
  modified_base 1: mod_base = OTHER; note = sugar modification: 2'-O-methoxyethylribose; note = backbone modification: 5'-phosphorothioate
  modified_base 2: mod_base = OTHER; note = sugar modification: 2'-O-methoxyethylribose; note = thymine; note = backbone modification: 5'-phosphorothioate
  modified_base 3: mod_base = OTHER; note = thymine; note = backbone modification: 5'-phosphorothioate; note = sugar modification: 2'-O-methoxyethylribose
  modified_base 4: mod_base = m5c; mod_base = OTHER; note = sugar modification: 2'-O-methoxyethylribose; note = backbone modification: 5'-phosphorothioate
  modified_base 5: mod_base = OTHER; note = sugar modification: lna; note = backbone modification: 5'-phosphorothioate; note = thymine
  modified_base 6: mod_base = OTHER; note = thymine; note = backbone modification: 5'-phosphorothioate; note = sugar modification: lna
  modified_base 7: mod_base = OTHER; note = sugar modification: 2'-O-methoxyethylribose; note = backbone modification: 5'-phosphorothioate
  modified_base 8: mod_base = OTHER; note = sugar modification: 2'-O-methoxyethylribose; note = thymine; note = backbone modification: 5'-phosphorothioate
  modified_base 9: mod_base = OTHER; note = backbone modification: 5'-phosphorothioate; note = sugar modification: 2'-O-methoxyethylribose
  modified_base 10: mod_base = OTHER; mod_base = m5c; note = sugar modification: 2'-O-methoxyethylribose; note = backbone modification: 5'-phosphorothioate
  modified_base 11: mod_base = OTHER; note = sugar modification: lna; note = thymine; note = backbone modification: 5'-phosphorothioate
  modified_base 12: mod_base = OTHER; note = backbone modification: 5'-phosphorothioate; note = thymine; note = sugar modification: 2'-O-methoxyethylribose
  modified_base 13: mod_base = OTHER; mod_base = m5c; note = backbone modification: 5'-phosphorothioate; note = sugar modification: 2'-O-methoxyethylribose
  modified_base 14: mod_base = OTHER; note = sugar modification: 2'-O-methoxyethylribose; note = backbone modification: 5'-phosphorothioate
  modified_base 15: mod_base = OTHER; note = thymine; note = sugar modification: 2'-O-methoxyethylribose; note = backbone modification: 5'-phosphorothioate
  modified_base 16: mod_base = m5c; mod_base = OTHER; note = backbone modification: 5'-phosphorothioate; note = sugar modification: 2'-O-methoxyethylribose
  modified_base 17: mod_base = OTHER; mod_base = m5c; note = sugar modification: 2'-O-methoxyethylribose
gttcttgtacttcatcc

SEQ ID NO: 713 - RNA, 17 nt, synthetic construct
  source 1..17: mol_type = other RNA; note = Antisense oligonucleotide
  modified_base 1: mod_base = OTHER; note = sugar modification: 2'-O-methoxyethylribose; note = backbone modification: 5'-phosphorothioate
  modified_base 2: mod_base = OTHER; note = thymine; note = sugar modification: 2'-O-methoxyethylribose; note = backbone modification: 5'-phosphorothioate
  modified_base 3: mod_base = OTHER; note = sugar modification: 2'-O-methoxyethylribose; note = thymine; note = backbone modification: 5'-phosphorothioate
  modified_base 4: mod_base = m5c; mod_base = OTHER; note = backbone modification: 5'-phosphorothioate; note = sugar modification: 2'-O-methoxyethylribose
  modified_base 5: mod_base = OTHER; note = thymine; note = sugar modification: 2'-O-methoxyethylribose; note = backbone modification: 5'-phosphorothioate
  modified_base 6: mod_base = OTHER; note = thymine; note = backbone modification: 5'-phosphorothioate; note = sugar modification: 2'-O-methoxyethylribose
  modified_base 7: mod_base = OTHER; note = sugar modification: 2'-O-methoxyethylribose; note = backbone modification: 5'-phosphorothioate
  modified_base 8: mod_base = OTHER; note = backbone modification: 5'-phosphorothioate; note = sugar modification: 2'-O-methoxyethylribose; note = thymine
  modified_base 9: mod_base = OTHER; note = sugar modification: 2'-O-methoxyethylribose; note = backbone modification: 5'-phosphorothioate
  modified_base 10: mod_base = OTHER; mod_base = m5c; note = sugar modification: 2'-O-methoxyethylribose; note = backbone modification: 5'-phosphorothioate
  modified_base 11: mod_base = OTHER; note = backbone modification: 5'-phosphorothioate; note = sugar modification: lna; note = thymine
  modified_base 12: mod_base = OTHER; note = sugar modification: 2'-O-methoxyethylribose; note = thymine; note = backbone modification: 5'-phosphorothioate
  modified_base 13: mod_base = OTHER; mod_base = m5c; note = backbone modification: 5'-phosphorothioate; note = sugar modification: lna
  modified_base 14: mod_base = OTHER; note = sugar modification: 2'-O-methoxyethylribose; note = backbone modification: 5'-phosphorothioate
  modified_base 15: mod_base = OTHER; note = thymine; note = backbone modification: 5'-phosphorothioate; note = sugar modification: lna
  modified_base 16: mod_base = OTHER; mod_base = m5c; note = sugar modification: 2'-O-methoxyethylribose; note = backbone modification: 5'-phosphorothioate
  modified_base 17: mod_base = m5c; mod_base = OTHER; note = sugar modification: 2'-O-methoxyethylribose
gttcttgtacttcatcc

SEQ ID NO: 714 - RNA, 17 nt, synthetic construct
  source 1..17: mol_type = other RNA; note = Antisense oligonucleotide
  modified_base 1: mod_base = OTHER; note = backbone modification: 5'-phosphorothioate; note = sugar modification: 2'-O-methoxyethylribose
  modified_base 2: mod_base = OTHER; note = thymine; note = sugar modification: 2'-O-methoxyethylribose; note = backbone modification: 5'-phosphorothioate
  modified_base 3: mod_base = OTHER; note = backbone modification: 5'-phosphorothioate; note = thymine; note = sugar modification: 2'-O-methoxyethylribose
  modified_base 4: mod_base = m5c; mod_base = OTHER; note = backbone modification: 5'-phosphorothioate; note = sugar modification: 2'-O-methoxyethylribose
  modified_base 5: mod_base = OTHER; note = thymine; note = sugar modification: 2'-O-methoxyethylribose; note = backbone modification: 5'-phosphorothioate
  modified_base 6: mod_base = OTHER; note = backbone modification: 5'-phosphorothioate; note = thymine; note = sugar modification: 2'-O-methoxyethylribose
  modified_base 7: mod_base = OTHER; note = backbone modification: 5'-phosphorothioate; note = sugar modification: 2'-O-methoxyethylribose
  modified_base 8: mod_base = OTHER; note = backbone modification: 5'-phosphorothioate; note = thymine; note = sugar modification: 2'-O-methoxyethylribose
  modified_base 9: mod_base = OTHER; note = backbone modification: 5'-phosphorothioate; note = sugar modification: lna
  modified_base 10: mod_base = OTHER; mod_base = m5c; note = backbone modification: 5'-phosphorothioate; note = sugar modification: 2'-O-methoxyethylribose
  modified_base 11: mod_base = OTHER; note = backbone modification: 5'-phosphorothioate; note = sugar modification: 2'-O-methoxyethylribose; note = thymine
  modified_base 12: mod_base = OTHER; note = thymine; note = sugar modification: 2'-O-methoxyethylribose; note = backbone modification: 5'-phosphorothioate
  modified_base 13: mod_base = m5c; mod_base = OTHER; note = sugar modification: 2'-O-methoxyethylribose; note = backbone modification: 5'-phosphorothioate
  modified_base 14: mod_base = OTHER; note = backbone modification: 5'-phosphorothioate; note = sugar modification: lna
  modified_base 15: mod_base = OTHER; note = sugar modification: 2'-O-methoxyethylribose; note = backbone modification: 5'-phosphorothioate; note = thymine
  modified_base 16: mod_base = OTHER; mod_base = m5c; note = backbone modification: 5'-phosphorothioate; note = sugar modification: 2'-O-methoxyethylribose
  modified_base 17: mod_base = OTHER; mod_base = m5c; note = sugar modification: lna
gttcttgtacttcatcc

SEQ ID NO: 715 - RNA, 17 nt, synthetic construct
  source 1..17: mol_type = other RNA; note = Antisense oligonucleotide
  modified_base 1: mod_base = OTHER; note = backbone modification: 5'-phosphorothioate; note = sugar modification: 2'-O-methoxyethylribose
  modified_base 2: mod_base = OTHER; note = backbone modification: 5'-phosphorothioate; note = sugar modification: 2'-O-methoxyethylribose; note = thymine
  modified_base 3: mod_base = OTHER; note = backbone modification: 5'-phosphorothioate; note = thymine; note = sugar modification: 2'-O-methoxyethylribose
  modified_base 4: mod_base = OTHER; mod_base = m5c; note = backbone modification: 5'-phosphorothioate; note = sugar modification: lna
  modified_base 5: mod_base = OTHER; note = sugar modification: 2'-O-methoxyethylribose; note = thymine; note = backbone modification: 5'-phosphorothioate
  modified_base 6: mod_base = OTHER; note = sugar modification: 2'-O-methoxyethylribose; note = thymine; note = backbone modification: 5'-phosphorothioate
  modified_base 7: mod_base = OTHER; note = sugar modification: 2'-O-methoxyethylribose; note = backbone modification: 5'-phosphorothioate
  modified_base 8: mod_base = OTHER; note = thymine; note = sugar modification: lna; note = backbone modification: 5'-phosphorothioate
  modified_base 9: mod_base = OTHER; note = sugar modification: 2'-O-methoxyethylribose; note = backbone modification: 5'-phosphorothioate
  modified_base 10: mod_base = m5c; mod_base = OTHER; note = backbone modification: 5'-phosphorothioate; note = sugar modification: 2'-O-methoxyethylribose
  modified_base 11: mod_base = OTHER; note = thymine; note = backbone modification: 5'-phosphorothioate; note = sugar modification: lna
  modified_base 12: mod_base = OTHER; note = sugar modification: 2'-O-methoxyethylribose; note = thymine; note = backbone modification: 5'-phosphorothioate
  modified_base 13: mod_base = m5c; mod_base = OTHER; note = sugar modification: 2'-O-methoxyethylribose; note = backbone modification: 5'-phosphorothioate
  modified_base 14: mod_base = OTHER; note = sugar modification: 2'-O-methoxyethylribose; note = backbone modification: 5'-phosphorothioate
  modified_base 15: mod_base = OTHER; note = thymine; note = backbone modification: 5'-phosphorothioate; note = sugar modification: 2'-O-methoxyethylribose
  modified_base 16: mod_base = m5c; mod_base = OTHER; note = sugar modification: 2'-O-methoxyethylribose; note = backbone modification: 5'-phosphorothioate
  modified_base 17: mod_base = m5c; mod_base = OTHER; note = sugar modification: 2'-O-methoxyethylribose
gttcttgtacttcatcc

SEQ ID NO: 716 - RNA, 17 nt, synthetic construct
  source 1..17: mol_type = other RNA; note = Antisense oligonucleotide
  modified_base 1: mod_base = OTHER; note = backbone modification: 5'-phosphorothioate; note = sugar modification: 2'-O-methoxyethylribose
  modified_base 2: mod_base = OTHER; note = sugar modification: 2'-O-methoxyethylribose; note = thymine; note = backbone modification: 5'-phosphorothioate
  modified_base 3: mod_base = OTHER; note = sugar modification: 2'-O-methoxyethylribose; note = thymine; note = backbone modification: 5'-phosphorothioate
  modified_base 4: mod_base = OTHER; mod_base = m5c; note = backbone modification: 5'-phosphorothioate; note = sugar modification: 2'-O-methoxyethylribose
  modified_base 5: mod_base = OTHER; note = backbone modification: 5'-phosphorothioate; note = sugar modification: 2'-O-methoxyethylribose; note = thymine
  modified_base 6: mod_base = OTHER; note = backbone modification: 5'-phosphorothioate; note = sugar modification: lna; note = thymine
  modified_base 7: mod_base = OTHER; note = sugar modification: 2'-O-methoxyethylribose; note = backbone modification: 5'-phosphorothioate
  modified_base 8: mod_base = OTHER; note = thymine; note = backbone modification: 5'-phosphorothioate; note = sugar modification: 2'-O-methoxyethylribose
  modified_base 9: mod_base = OTHER; note = backbone modification: 5'-phosphorothioate; note = sugar modification: lna
  modified_base 10: mod_base = m5c; mod_base = OTHER; note = sugar modification: 2'-O-methoxyethylribose; note = backbone modification: 5'-phosphorothioate
  modified_base 11: mod_base = OTHER; note = thymine; note = sugar modification: 2'-O-methoxyethylribose; note = backbone modification: 5'-phosphorothioate
  modified_base 12: mod_base = OTHER; note = thymine; note = backbone modification: 5'-phosphorothioate; note = sugar modification: lna
  modified_base 13: mod_base = OTHER; mod_base = m5c; note = sugar modification: 2'-O-methoxyethylribose; note = backbone modification: 5'-phosphorothioate
  modified_base 14: mod_base = OTHER; note = backbone modification: 5'-phosphorothioate; note = sugar modification: 2'-O-methoxyethylribose
  modified_base 15: mod_base = OTHER; note = sugar modification: 2'-O-methoxyethylribose; note = backbone modification: 5'-phosphorothioate; note = thymine
  modified_base 16: mod_base = OTHER; mod_base = m5c; note = sugar modification: 2'-O-methoxyethylribose; note = backbone modification: 5'-phosphorothioate
  modified_base 17: mod_base = OTHER; mod_base = m5c; note = sugar modification: 2'-O-methoxyethylribose
gttcttgtacttcatcc

SEQ ID NO: 717 - RNA, 17 nt, synthetic construct
  source 1..17: mol_type = other RNA; note = Antisense oligonucleotide
  modified_base 1: mod_base = OTHER; note = sugar modification: 2'-O-methoxyethylribose; note = backbone modification: 5'-phosphorothioate
  modified_base 2: mod_base = OTHER; note = thymine; note = backbone modification: 5'-phosphorothioate; note = sugar modification: 2'-O-methoxyethylribose
  modified_base 3: mod_base = OTHER; note = thymine; note = backbone modification: 5'-phosphorothioate; note = sugar modification: lna
  modified_base 4: mod_base = m5c; mod_base = OTHER; note = backbone modification: 5'-phosphorothioate; note = sugar modification: 2'-O-methoxyethylribose
  modified_base 5: mod_base = OTHER; note = backbone modification: 5'-phosphorothioate; note = thymine; note = sugar modification: lna
  modified_base 6: mod_base = OTHER; note = backbone modification: 5'-phosphorothioate; note = thymine; note = sugar modification: 2'-O-methoxyethylribose
  modified_base 7: mod_base = OTHER; note = backbone modification: 5'-phosphorothioate; note = sugar modification: 2'-O-methoxyethylribose
  modified_base 8: mod_base = OTHER; note = backbone modification: 5'-phosphorothioate; note = sugar modification: 2'-O-methoxyethylribose; note = thymine
  modified_base 9: mod_base = OTHER; note = backbone modification: 5'-phosphorothioate; note = sugar modification: 2'-O-methoxyethylribose
  modified_base 10: mod_base = m5c; mod_base = OTHER; note = sugar modification: 2'-O-methoxyethylribose; note = backbone modification: 5'-phosphorothioate
  modified_base 11: mod_base = OTHER; note = backbone modification: 5'-phosphorothioate; note = sugar modification: 2'-O-methoxyethylribose; note = thymine
  modified_base 12: mod_base = OTHER; note = backbone modification: 5'-phosphorothioate; note = sugar modification: 2'-O-methoxyethylribose; note = thymine
  modified_base 13: mod_base = m5c; mod_base = OTHER; note = backbone modification: 5'-phosphorothioate; note = sugar modification: 2'-O-methoxyethylribose
  modified_base 14: mod_base = OTHER; note = sugar modification: 2'-O-methoxyethylribose; note = backbone modification: 5'-phosphorothioate
  modified_base 15: mod_base = OTHER; note = backbone modification: 5'-phosphorothioate; note = sugar modification: 2'-O-methoxyethylribose; note = thymine
  modified_base 16: mod_base = OTHER; mod_base = m5c; note = sugar modification: lna; note = backbone modification: 5'-phosphorothioate
  modified_base 17: mod_base = OTHER; mod_base = m5c; note = sugar modification: 2'-O-methoxyethylribose
gttcttgtacttcatcc

SEQ ID NO: 718 - RNA, 16 nt, synthetic construct
  source 1..16: mol_type = other RNA; note = Antisense oligonucleotide
  modified_base 1: mod_base = OTHER; note = backbone modification: 5'-phosphorothioate; note = sugar modification: lna; note = thymine
  modified_base 2: mod_base = OTHER; note = backbone modification: 5'-phosphorothioate; note = sugar modification: 2'-O-methoxyethylribose
  modified_base 3: mod_base = OTHER; note = backbone modification: 5'-phosphorothioate; note = thymine; note = sugar modification: 2'-O-methoxyethylribose
  modified_base 4: mod_base = OTHER; note = thymine; note = sugar modification: 2'-O-methoxyethylribose; note = backbone modification: 5'-phosphorothioate
  modified_base 5: mod_base = OTHER; mod_base = m5c; note = backbone modification: 5'-phosphorothioate; note = sugar modification: 2'-O-methoxyethylribose
  modified_base 6: mod_base = OTHER; note = backbone modification: 5'-phosphorothioate; note = thymine; note = sugar modification: 2'-O-methoxyethylribose
  modified_base 7: mod_base = OTHER; note = thymine; note = sugar modification: 2'-O-methoxyethylribose; note = backbone modification: 5'-phosphorothioate
  modified_base 8: mod_base = OTHER; note = sugar modification: 2'-O-methoxyethylribose; note = backbone modification: 5'-phosphorothioate
  modified_base 9: mod_base = OTHER; note = sugar modification: 2'-O-methoxyethylribose; note = backbone modification: 5'-phosphorothioate; note = thymine
  modified_base 10: mod_base = OTHER; note = backbone modification: 5'-phosphorothioate; note = sugar modification: 2'-O-methoxyethylribose
  modified_base 11: mod_base = m5c; mod_base = OTHER; note = sugar modification: 2'-O-methoxyethylribose; note = backbone modification: 5'-phosphorothioate
  modified_base 12: mod_base = OTHER; note = thymine; note = sugar modification: 2'-O-methoxyethylribose; note = backbone modification: 5'-phosphorothioate
  modified_base 13: mod_base = OTHER; note = thymine; note = sugar modification: 2'-O-methoxyethylribose; note = backbone modification: 5'-phosphorothioate
  modified_base 14: mod_base = OTHER; mod_base = m5c; note = backbone modification: 5'-phosphorothioate; note = sugar modification: 2'-O-methoxyethylribose
  modified_base 15: mod_base = OTHER; note = backbone modification: 5'-phosphorothioate; note = sugar modification: 2'-O-methoxyethylribose
  modified_base 16: mod_base = OTHER; note = sugar modification: lna; note = thymine
tgttcttgtacttcat

SEQ ID NO: 719 - RNA, 16 nt, synthetic construct
  source 1..16: mol_type = other RNA; note = Antisense oligonucleotide
  modified_base 1: mod_base = OTHER; note = backbone modification: 5'-phosphorothioate; note = thymine; note = sugar modification: lna
  modified_base 2: mod_base = OTHER; note = sugar modification: 2'-O-methoxyethylribose; note = backbone modification: 5'-phosphorothioate
  modified_base 3: mod_base = OTHER; note = backbone modification: 5'-phosphorothioate; note = sugar modification: 2'-O-methoxyethylribose; note = thymine
  modified_base 4: mod_base = OTHER; note = backbone modification: 5'-phosphorothioate; note = thymine; note = sugar modification: 2'-O-methoxyethylribose
  modified_base 5: mod_base = OTHER; mod_base = m5c; note = sugar modification: 2'-O-methoxyethylribose; note = backbone modification: 5'-phosphorothioate
  modified_base 6: mod_base = OTHER; note = sugar modification: 2'-O-methoxyethylribose; note = backbone modification: 5'-phosphorothioate; note = thymine
  modified_base 7: mod_base = OTHER; note = thymine; note = sugar modification: 2'-O-methoxyethylribose; note = backbone modification: 5'-phosphorothioate
  modified_base 8: mod_base = OTHER; note = sugar modification: 2'-O-methoxyethylribose; note = backbone modification: 5'-phosphorothioate
  modified_base 9: mod_base = OTHER; note = thymine; note = sugar modification: 2'-O-methoxyethylribose; note = backbone modification: 5'-phosphorothioate
  modified_base 10: mod_base = OTHER; note = backbone modification: 5'-phosphorothioate; note = sugar modification: 2'-O-methoxyethylribose
  modified_base 11: mod_base = OTHER; mod_base = m5c; note = backbone modification: 5'-phosphorothioate; note = sugar modification: 2'-O-methoxyethylribose
  modified_base 12: mod_base = OTHER; note = thymine; note = sugar modification: 2'-O-methoxyethylribose; note = backbone modification: 5'-phosphorothioate
  modified_base 13: mod_base = OTHER; note = thymine; note = backbone modification: 5'-phosphorothioate; note = sugar modification: 2'-O-methoxyethylribose
  modified_base 14: mod_base = OTHER; mod_base = m5c; note = backbone modification: 5'-phosphorothioate; note = sugar modification: 2'-O-methoxyethylribose
  modified_base 15: mod_base = OTHER; note = sugar modification: lna; note = backbone modification: 5'-phosphorothioate
  modified_base 16: mod_base = OTHER; note = sugar modification: lna; note = thymine
tgttcttgtacttcat

SEQ ID NO: 720 - RNA, 16 nt, synthetic construct
  source 1..16: mol_type = other RNA; note = Antisense oligonucleotide
  modified_base 1: mod_base = OTHER; note = backbone modification: 5'-phosphorothioate; note = sugar modification: lna; note = thymine
  modified_base 2: mod_base = OTHER; note = backbone modification: 5'-phosphorothioate; note = sugar modification: lna
  modified_base 3: mod_base = OTHER; note = backbone modification: 5'-phosphorothioate; note = thymine; note = sugar modification: 2'-O-methoxyethylribose
  modified_base 4: mod_base = OTHER; note = backbone modification: 5'-phosphorothioate; note = thymine; note = sugar modification: 2'-O-methoxyethylribose
  modified_base 5: mod_base = m5c; mod_base = OTHER; note = backbone modification: 5'-phosphorothioate; note = sugar modification: 2'-O-methoxyethylribose
  modified_base 6: mod_base = OTHER; note = backbone modification: 5'-phosphorothioate; note = thymine; note = sugar modification: 2'-O-methoxyethylribose
  modified_base 7: mod_base = OTHER; note = sugar modification: 2'-O-methoxyethylribose; note = thymine; note = backbone modification: 5'-phosphorothioate
  modified_base 8: mod_base = OTHER; note = backbone modification: 5'-phosphorothioate; note = sugar modification: 2'-O-methoxyethylribose
  modified_base 9: mod_base = OTHER; note = backbone modification: 5'-phosphorothioate; note = thymine; note = sugar modification: 2'-O-methoxyethylribose
  modified_base 10: mod_base = OTHER; note = backbone modification: 5'-phosphorothioate; note = sugar modification: 2'-O-methoxyethylribose
  modified_base 11: mod_base = m5c; mod_base = OTHER; note = backbone modification: 5'-phosphorothioate; note = sugar modification: 2'-O-methoxyethylribose
  modified_base 12: mod_base = OTHER; note = backbone modification: 5'-phosphorothioate; note = sugar modification: 2'-O-methoxyethylribose; note = thymine
  modified_base 13: mod_base = OTHER; note = sugar modification: 2'-O-methoxyethylribose; note = thymine; note = backbone modification: 5'-phosphorothioate
  modified_base 14: mod_base = OTHER; mod_base = m5c; note = sugar modification: 2'-O-methoxyethylribose; note = backbone modification: 5'-phosphorothioate
  modified_base 15: mod_base = OTHER; note = sugar modification: 2'-O-methoxyethylribose; note = backbone modification: 5'-phosphorothioate
  modified_base 16: mod_base = OTHER; note = sugar modification: lna; note = thymine
tgttcttgtacttcat

SEQ ID NO: 721 - RNA, 16 nt, synthetic construct
  source 1..16: mol_type = other RNA; note = Antisense oligonucleotide
  modified_base 1: mod_base = OTHER; note = thymine; note = sugar modification: 2'-O-methoxyethylribose; note = backbone modification: 5'-phosphorothioate
  modified_base 2: mod_base = OTHER; note = backbone modification: 5'-phosphorothioate; note = sugar modification: lna
  modified_base 3: mod_base = OTHER; note = backbone modification: 5'-phosphorothioate; note = thymine; note = sugar modification: 2'-O-methoxyethylribose
  modified_base 4: mod_base = OTHER; note = backbone modification: 5'-phosphorothioate; note = thymine; note = sugar modification: lna
  modified_base 5: mod_base = OTHER; mod_base = m5c; note = sugar modification: 2'-O-methoxyethylribose; note = backbone modification: 5'-phosphorothioate
  modified_base 6: mod_base = OTHER; note = sugar modification: 2'-O-methoxyethylribose; note = backbone modification: 5'-phosphorothioate; note = thymine
  modified_base 7: mod_base = OTHER; note = thymine; note = sugar modification: 2'-O-methoxyethylribose; note = backbone modification: 5'-phosphorothioate
  modified_base 8: mod_base = OTHER; note = sugar modification: 2'-O-methoxyethylribose; note = backbone modification: 5'-phosphorothioate
  modified_base 9: mod_base = OTHER; note = thymine; note = backbone modification: 5'-phosphorothioate; note = sugar modification: 2'-O-methoxyethylribose
  modified_base 10: mod_base = OTHER; note = sugar modification: 2'-O-methoxyethylribose; note = backbone modification: 5'-phosphorothioate
  modified_base 11: mod_base = m5c; mod_base = OTHER; note = backbone modification: 5'-phosphorothioate; note = sugar modification: 2'-O-methoxyethylribose
  modified_base 12: mod_base = OTHER; note = sugar modification: lna; note = backbone modification: 5'-phosphorothioate; note = thymine
  modified_base 13: mod_base = OTHER; note = backbone modification: 5'-phosphorothioate; note = sugar modification: 2'-O-methoxyethylribose; note = thymine
  modified_base 14: mod_base = OTHER; mod_base = m5c; note = backbone modification: 5'-phosphorothioate; note = sugar modification: 2'-O-methoxyethylribose
  modified_base 15: mod_base = OTHER; note = backbone modification: 5'-phosphorothioate; note = sugar modification: 2'-O-methoxyethylribose
  modified_base 16: mod_base = OTHER; note = thymine; note = sugar modification: 2'-O-methoxyethylribose
tgttcttgtacttcat

SEQ ID NO: 722 - RNA, 16 nt, synthetic construct
  source 1..16: mol_type = other RNA; note = Antisense oligonucleotide
  modified_base 1: mod_base = OTHER; note = backbone modification: 5'-phosphorothioate; note = sugar modification: 2'-O-methoxyethylribose; note = thymine
  modified_base 2: mod_base = OTHER; note = backbone modification: 5'-phosphorothioate; note = sugar modification: 2'-O-methoxyethylribose
  modified_base 3: mod_base = OTHER; note = sugar modification: 2'-O-methoxyethylribose; note = backbone modification: 5'-phosphorothioate; note = thymine
  modified_base 4: mod_base = OTHER; note = sugar modification: lna; note = backbone modification: 5'-phosphorothioate; note = thymine
  modified_base 5: mod_base = OTHER; mod_base = m5c; note = sugar modification: lna; note = backbone modification: 5'-phosphorothioate
  modified_base 6: mod_base = OTHER; note = backbone modification: 5'-phosphorothioate; note = sugar modification: 2'-O-methoxyethylribose; note = thymine
  modified_base 7: mod_base = OTHER; note = backbone modification: 5'-phosphorothioate; note = sugar modification: 2'-O-methoxyethylribose; note = thymine
  modified_base 8: mod_base = OTHER; note = sugar modification: lna; note = backbone modification: 5'-phosphorothioate
  modified_base 9: mod_base = OTHER; note = sugar modification: 2'-O-methoxyethylribose; note = backbone modification: 5'-phosphorothioate; note = thymine
  modified_base 10: mod_base = OTHER; note = sugar modification: 2'-O-methoxyethylribose; note = backbone modification: 5'-phosphorothioate
  modified_base 11: mod_base = OTHER; mod_base = m5c; note = backbone modification: 5'-phosphorothioate; note = sugar modification: 2'-O-methoxyethylribose
  modified_base 12: mod_base = OTHER; note = sugar modification: 2'-O-methoxyethylribose; note = thymine; note = backbone modification: 5'-phosphorothioate
  modified_base 13: mod_base = OTHER; note = sugar modification: 2'-O-methoxyethylribose; note = backbone modification: 5'-phosphorothioate; note = thymine
  modified_base 14: mod_base = m5c; mod_base = OTHER; note = sugar modification: 2'-O-methoxyethylribose; note = backbone modification: 5'-phosphorothioate
  modified_base 15: mod_base = OTHER; note = backbone modification: 5'-phosphorothioate; note = sugar modification: 2'-O-methoxyethylribose
  modified_base 16: mod_base = OTHER; note = sugar modification: 2'-O-methoxyethylribose; note = thymine
tgttcttgtacttcat

SEQ ID NO: 723 - RNA, 16 nt, synthetic construct
  source 1..16: mol_type = other RNA; note = Antisense oligonucleotide
  modified_base 1: mod_base = OTHER; note = thymine; note = backbone modification: 5'-phosphorothioate; note = sugar modification: 2'-O-methoxyethylribose
  modified_base 2: mod_base = OTHER; note = sugar modification: 2'-O-methoxyethylribose; note = backbone modification: 5'-phosphorothioate
  modified_base 3: mod_base = OTHER; note = sugar modification: 2'-O-methoxyethylribose; note = backbone modification: 5'-phosphorothioate; note = thymine
  modified_base 4: mod_base = OTHER; note = backbone modification: 5'-phosphorothioate; note = sugar modification: 2'-O-methoxyethylribose; note = thymine
  modified_base 5: mod_base = m5c; mod_base = OTHER; note = backbone modification: 5'-phosphorothioate; note = sugar modification: 2'-O-methoxyethylribose
  modified_base 6: mod_base = OTHER; note = backbone modification: 5'-phosphorothioate; note = sugar modification: 2'-O-methoxyethylribose; note = thymine
  modified_base 7: mod_base = OTHER; note = sugar modification: 2'-O-methoxyethylribose; note = thymine; note = backbone modification: 5'-phosphorothioate
  modified_base 8: mod_base = OTHER; note = sugar modification: 2'-O-methoxyethylribose; note = backbone modification: 5'-phosphorothioate
  modified_base 9: mod_base = OTHER; note = sugar modification: lna; note = thymine; note = backbone modification: 5'-phosphorothioate
  modified_base 10: mod_base = OTHER; note = sugar modification: 2'-O-methoxyethylribose; note = backbone modification: 5'-phosphorothioate
  modified_base 11: mod_base = m5c; mod_base = OTHER; note = backbone modification: 5'-phosphorothioate; note = sugar modification: lna
  modified_base 12: mod_base = OTHER; note = backbone modification: 5'-phosphorothioate; note = thymine; note = sugar modification: 2'-O-methoxyethylribose
  modified_base 13: mod_base = OTHER; note = thymine; note = sugar modification: lna; note = backbone modification: 5'-phosphorothioate
  modified_base 14: mod_base = m5c; mod_base = OTHER; note = sugar modification: 2'-O-methoxyethylribose; note = backbone modification: 5'-phosphorothioate
  modified_base 15: mod_base = OTHER; note = backbone modification: 5'-phosphorothioate; note = sugar modification: 2'-O-methoxyethylribose
  modified_base 16: mod_base = OTHER; note = thymine; note = sugar modification: 2'-O-methoxyethylribose
tgttcttgtacttcat

SEQ ID NO: 724 - RNA, 16 nt, synthetic construct
  source 1..16: mol_type = other RNA; note = Antisense oligonucleotide
  modified_base 1: mod_base = OTHER; note = sugar modification: 2'-O-methoxyethylribose; note = backbone modification: 5'-phosphorothioate; note = thymine
  modified_base 2: mod_base = OTHER; note = backbone modification: 5'-phosphorothioate; note = sugar modification: 2'-O-methoxyethylribose
  modified_base 3: mod_base = OTHER; note = sugar modification: lna; note = thymine; note = backbone modification: 5'-phosphorothioate
  modified_base 4: mod_base = OTHER; note = backbone modification: 5'-phosphorothioate; note = sugar modification: lna; note = thymine
  modified_base 5: mod_base = OTHER; mod_base = m5c; note = backbone modification: 5'-phosphorothioate; note = sugar modification: 2'-O-methoxyethylribose
  modified_base 6: mod_base = OTHER; note = backbone modification: 5'-phosphorothioate; note = sugar modification: 2'-O-methoxyethylribose; note = thymine
  modified_base 7: mod_base = OTHER; note = thymine; note = backbone modification: 5'-phosphorothioate; note = sugar modification: 2'-O-methoxyethylribose
  modified_base 8: mod_base = OTHER; note = sugar modification: 2'-O-methoxyethylribose; note = backbone modification: 5'-phosphorothioate
  modified_base 9: mod_base = OTHER; note = backbone modification: 5'-phosphorothioate; note = thymine; note = sugar modification: 2'-O-methoxyethylribose
  modified_base 10: mod_base = OTHER; note = sugar modification: 2'-O-methoxyethylribose; note = backbone modification: 5'-phosphorothioate
  modified_base 11: mod_base = m5c; mod_base = OTHER; note = backbone modification: 5'-phosphorothioate; note = sugar modification: 2'-O-methoxyethylribose
  modified_base 12: mod_base = OTHER; note = sugar modification: 2'-O-methoxyethylribose; note = backbone modification: 5'-phosphorothioate; note = thymine
  modified_base 13: mod_base = OTHER; note = sugar modification: 2'-O-methoxyethylribose; note = thymine; note = backbone modification: 5'-phosphorothioate
  modified_base 14: mod_base = OTHER; mod_base = m5c; note = sugar modification: 2'-O-methoxyethylribose; note = backbone modification: 5'-phosphorothioate
  modified_base 15: mod_base = OTHER; note = backbone modification: 5'-phosphorothioate; note = sugar modification: 2'-O-methoxyethylribose
  modified_base 16: mod_base = OTHER; note = thymine; note = sugar modification: lna
tgttcttgtacttcat

SEQ ID NO: 725 - RNA, 16 nt, synthetic construct
  source 1..16: mol_type = other RNA; note = Antisense oligonucleotide
  modified_base 1: mod_base = OTHER; note = backbone modification: 5'-phosphorothioate; note = thymine; note = sugar modification: lna
  modified_base 2: mod_base = OTHER; note = sugar modification: 2'-O-methoxyethylribose; note = backbone modification: 5'-phosphorothioate
  modified_base 3: mod_base = OTHER; note = sugar modification: lna; note = thymine; note = backbone modification: 5'-phosphorothioate
  modified_base 4: mod_base = OTHER; note = thymine; note = sugar modification: 2'-O-methoxyethylribose; note = backbone modification: 5'-phosphorothioate
  modified_base 5: mod_base = OTHER; mod_base = m5c; note = sugar modification: 2'-O-methoxyethylribose; note = backbone modification: 5'-phosphorothioate
  modified_base 6: mod_base = OTHER; note = backbone modification: 5'-phosphorothioate; note = sugar modification: 2'-O-methoxyethylribose; note = thymine
  modified_base 7: mod_base = OTHER; note = sugar modification: 2'-O-methoxyethylribose; note = backbone modification: 5'-phosphorothioate; note = thymine
  modified_base 8: mod_base = OTHER; note = backbone modification: 5'-phosphorothioate; note = sugar modification: 2'-O-methoxyethylribose
  modified_base 9: mod_base = OTHER; note = backbone modification: 5'-phosphorothioate; note = sugar modification: 2'-O-methoxyethylribose; note = thymine
  modified_base 10: mod_base = OTHER; note = sugar modification: lna; note = backbone modification: 5'-phosphorothioate
  modified_base 11: mod_base = m5c; mod_base = OTHER; note = sugar modification: 2'-O-methoxyethylribose; note = backbone modification: 5'-phosphorothioate
  modified_base 12: mod_base = OTHER; note = sugar modification: 2'-O-methoxyethylribose; note = backbone modification: 5'-phosphorothioate; note = thymine
  modified_base 13: mod_base = OTHER; note = sugar modification: 2'-O-methoxyethylribose; note = thymine; note = backbone modification: 5'-phosphorothioate
  modified_base 14: mod_base = OTHER; mod_base = m5c; note = sugar modification: 2'-O-methoxyethylribose; note = backbone modification: 5'-phosphorothioate
  modified_base 15: mod_base = OTHER; note = backbone modification: 5'-phosphorothioate; note = sugar modification: 2'-O-methoxyethylribose
  modified_base 16: mod_base = OTHER; note = sugar modification: 2'-O-methoxyethylribose; note = thymine
tgttcttgtacttcat

SEQ ID NO: 726 - RNA, 16 nt, synthetic construct
  source 1..16: mol_type = other RNA; note = Antisense oligonucleotide
  modified_base 1: mod_base = OTHER; note = backbone modification: 5'-phosphorothioate; note = sugar modification: 2'-O-methoxyethylribose; note = thymine
  modified_base 2: mod_base = OTHER; note = backbone modification: 5'-phosphorothioate; note = sugar modification: 2'-O-methoxyethylribose
  modified_base 3: mod_base = OTHER; note = thymine; note = backbone modification: 5'-phosphorothioate; note = sugar modification: 2'-O-methoxyethylribose
  modified_base 4: mod_base = OTHER; note = thymine; note = sugar modification: 2'-O-methoxyethylribose; note = backbone modification: 5'-phosphorothioate
  modified_base 5: mod_base = m5c; mod_base = OTHER; note = sugar modification: 2'-O-methoxyethylribose; note = backbone modification: 5'-phosphorothioate
  modified_base 6: mod_base = OTHER; note = sugar modification: 2'-O-methoxyethylribose; note = thymine; note = backbone modification: 5'-phosphorothioate
  modified_base 7: mod_base = OTHER; note = thymine; note = backbone modification: 5'-phosphorothioate; note = sugar modification: 2'-O-methoxyethylribose
  modified_base 8: mod_base = OTHER; note = backbone modification: 5'-phosphorothioate; note = sugar modification: lna
  modified_base 9: mod_base = OTHER; note = backbone modification: 5'-phosphorothioate; note = thymine; note = sugar modification: 2'-O-methoxyethylribose
  modified_base 10: mod_base = OTHER; note = sugar modification: lna; note = backbone modification: 5'-phosphorothioate
  modified_base 11: mod_base = OTHER; mod_base = m5c; note = backbone modification: 5'-phosphorothioate; note = sugar modification: 2'-O-methoxyethylribose
  modified_base 12: mod_base = OTHER; note = thymine; note = backbone modification: 5'-phosphorothioate; note = sugar modification: lna
  modified_base 13: mod_base = OTHER; note = backbone modification: 5'-phosphorothioate; note = thymine; note = sugar modification: 2'-O-methoxyethylribose
  modified_base 14: mod_base = OTHER; mod_base = m5c; note = backbone modification: 5'-phosphorothioate; note = sugar modification: 2'-O-methoxyethylribose
  modified_base 15: mod_base = OTHER; note = backbone modification: 5'-phosphorothioate; note = sugar modification: 2'-O-methoxyethylribose
  modified_base 16: mod_base = OTHER; note = thymine; note = sugar modification: 2'-O-methoxyethylribose
tgttcttgtacttcat

SEQ ID NO: 727 - RNA, 16 nt, synthetic construct
  source 1..16: mol_type = other RNA; note = Antisense oligonucleotide
  modified_base 1: mod_base = OTHER; note = thymine; note = sugar modification: 2'-O-methoxyethylribose; note = backbone modification: 5'-phosphorothioate
  modified_base 2: mod_base = OTHER; note = sugar modification: 2'-O-methoxyethylribose; note = backbone modification: 5'-phosphorothioate
  modified_base 3: mod_base = OTHER; note = thymine; note = sugar modification: lna; note = backbone modification: 5'-phosphorothioate
  modified_base 4: mod_base = OTHER; note = sugar modification: 2'-O-methoxyethylribose; note = backbone modification: 5'-phosphorothioate; note = thymine
  modified_base 5: mod_base = m5c; mod_base = OTHER; note = backbone modification: 5'-phosphorothioate; note = sugar modification: 2'-O-methoxyethylribose
  modified_base 6: mod_base = OTHER; note = sugar modification: 2'-O-methoxyethylribose; note = backbone modification: 5'-phosphorothioate; note = thymine
  modified_base 7: mod_base = OTHER; note = sugar modification: lna; note = backbone modification: 5'-phosphorothioate; note = thymine
  modified_base 8: mod_base = OTHER; note = backbone modification: 5'-phosphorothioate; note = sugar modification: 2'-O-methoxyethylribose
  modified_base 9: mod_base = OTHER; note = sugar modification: 2'-O-methoxyethylribose; note = thymine; note = backbone modification: 5'-phosphorothioate
  modified_base 10: mod_base = OTHER; note = sugar modification: 2'-O-methoxyethylribose; note = backbone modification: 5'-phosphorothioate
  modified_base 11: mod_base = m5c; mod_base = OTHER; note = backbone modification: 5'-phosphorothioate; note = sugar modification: lna
  modified_base 12: mod_base = OTHER; note = backbone modification: 5'-phosphorothioate; note = thymine; note = sugar modification: 2'-O-methoxyethylribose
  modified_base 13: mod_base = OTHER; note = sugar modification: 2'-O-methoxyethylribose; note = thymine; note = backbone modification: 5'-phosphorothioate
  modified_base 14: mod_base = OTHER; mod_base = m5c; note = sugar modification: 2'-O-methoxyethylribose; note = backbone modification: 5'-phosphorothioate
  modified_base 15: mod_base = OTHER; note = sugar modification: 2'-O-methoxyethylribose; note = backbone modification: 5'-phosphorothioate
  modified_base 16: mod_base = OTHER; note = thymine; note = sugar modification: 2'-O-methoxyethylribose
tgttcttgtacttcat

SEQ ID NO: 728 - RNA, 16 nt, synthetic construct
  source 1..16: mol_type = other RNA; note = Antisense oligonucleotide
  modified_base 1: mod_base = OTHER; note = thymine; note = backbone modification: 5'-phosphorothioate; note = sugar modification: 2'-O-methoxyethylribose
  modified_base 2: mod_base = OTHER; note = backbone modification: 5'-phosphorothioate; note = sugar modification: 2'-O-methoxyethylribose
  modified_base 3: mod_base = OTHER; note = backbone modification: 5'-phosphorothioate; note = sugar modification: 2'-O-methoxyethylribose; note = thymine
  modified_base 4: mod_base = OTHER; note = thymine; note = sugar modification: lna; note = backbone modification: 5'-phosphorothioate
  modified_base 5: mod_base = OTHER; mod_base = m5c; note = backbone modification: 5'-phosphorothioate; note = sugar modification: 2'-O-methoxyethylribose
  modified_base 6: mod_base = OTHER; note = thymine; note = backbone modification: 5'-phosphorothioate; note = sugar modification: 2'-O-methoxyethylribose
  modified_base 7: mod_base = OTHER; note = backbone modification: 5'-phosphorothioate; note = thymine; note = sugar modification: 2'-O-methoxyethylribose
  modified_base 8: mod_base = OTHER; note = backbone modification: 5'-phosphorothioate; note = sugar modification: lna
  modified_base 9: mod_base = OTHER; note = backbone modification: 5'-phosphorothioate; note = thymine; note = sugar modification: 2'-O-methoxyethylribose
  modified_base 10: mod_base = OTHER; note = backbone modification: 5'-phosphorothioate; note = sugar modification: 2'-O-methoxyethylribose
  modified_base 11: mod_base = OTHER; mod_base = m5c; note = sugar modification: lna; note = backbone modification: 5'-phosphorothioate
  modified_base 12: mod_base = OTHER; note = thymine; note = sugar modification: 2'-O-methoxyethylribose; note = backbone modification: 5'-phosphorothioate
  modified_base 13: mod_base = OTHER; note = sugar modification: 2'-O-methoxyethylribose; note = backbone modification: 5'-phosphorothioate; note = thymine
  modified_base 14: mod_base = m5c; mod_base = OTHER; note = backbone modification: 5'-phosphorothioate; note = sugar modification: lna
  modified_base 15: mod_base = OTHER; note = sugar modification: 2'-O-methoxyethylribose; note = backbone modification: 5'-phosphorothioate
  modified_base 16: mod_base = OTHER; note = sugar modification: 2'-O-methoxyethylribose; note = thymine
tgttcttgtacttcat

SEQ ID NO: 729 - RNA, 16 nt, synthetic construct
  source 1..16: mol_type = other RNA; note = Antisense oligonucleotide
  modified_base 1: mod_base = OTHER; note = thymine; note = sugar modification: lna; note = backbone modification: 5'-phosphorothioate
  modified_base 2: mod_base = OTHER; note = sugar modification: 2'-O-methoxyethylribose; note = backbone modification: 5'-phosphorothioate
  modified_base 3: mod_base = OTHER; note = thymine; note = sugar modification: 2'-O-methoxyethylribose; note = backbone modification: 5'-phosphorothioate
  modified_base 4: mod_base = OTHER; note = thymine; note = backbone modification: 5'-phosphorothioate; note = sugar modification: lna
  modified_base 5: mod_base = m5c; mod_base = OTHER; note = sugar modification: 2'-O-methoxyethylribose; note = backbone modification: 5'-phosphorothioate
  modified_base 6: mod_base = OTHER; note = thymine; note = sugar modification: 2'-O-methoxyethylribose; note = backbone modification: 5'-phosphorothioate
  modified_base 7: mod_base = OTHER; note = sugar modification: 2'-O-methoxyethylribose; note = thymine; note = backbone modification: 5'-phosphorothioate
  modified_base 8: mod_base = OTHER; note = sugar modification: 2'-O-methoxyethylribose; note = backbone modification: 5'-phosphorothioate
  modified_base 9: mod_base = OTHER; note = sugar modification: 2'-O-methoxyethylribose; note = backbone modification: 5'-phosphorothioate; note = thymine
  modified_base 10: mod_base = OTHER; note = sugar modification: lna; note = backbone modification: 5'-phosphorothioate
  modified_base 11: mod_base = OTHER; mod_base = m5c; note = sugar modification: lna; note = backbone modification: 5'-phosphorothioate
  modified_base 12: mod_base = OTHER; note = thymine; note = sugar modification: 2'-O-methoxyethylribose; note = backbone modification: 5'-phosphorothioate
  modified_base 13: mod_base = OTHER; note = sugar modification: 2'-O-methoxyethylribose; note = backbone modification: 5'-phosphorothioate; note = thymine
  modified_base 14: mod_base = OTHER; mod_base = m5c; note = backbone modification: 5'-phosphorothioate; note = sugar modification: 2'-O-methoxyethylribose
  modified_base 15: mod_base = OTHER; note = sugar modification: 2'-O-methoxyethylribose; note = backbone modification: 5'-phosphorothioate
  modified_base 16: mod_base = OTHER; note = thymine; note = sugar modification: 2'-O-methoxyethylribose
tgttcttgtacttcat

SEQ ID NO: 730 - RNA, 16 nt, synthetic construct
  source 1..16: mol_type = other RNA; note = Antisense oligonucleotide
  modified_base 1: mod_base = OTHER; note = backbone modification: 5'-phosphorothioate; note = sugar modification: lna; note = thymine
  modified_base 2: mod_base = OTHER; note = sugar modification: 2'-O-methoxyethylribose; note = backbone modification: 5'-phosphorothioate
  modified_base 3: mod_base = OTHER; note = thymine; note = backbone modification: 5'-phosphorothioate; note = sugar modification: 2'-O-methoxyethylribose
  modified_base 4: mod_base = OTHER; note = thymine; note = sugar modification: 2'-O-methoxyethylribose; note = backbone modification: 5'-phosphorothioate
  modified_base 5: mod_base = OTHER; mod_base = m5c; note = sugar modification: 2'-O-methoxyethylribose; note = backbone modification: 5'-phosphorothioate
  modified_base 6: mod_base = OTHER; note = thymine; note = backbone modification: 5'-phosphorothioate; note = sugar modification: 2'-O-methoxyethylribose
  modified_base 7: mod_base = OTHER; note = sugar modification: 2'-O-methoxyethylribose; note = backbone modification: 5'-phosphorothioate; note = thymine
  modified_base 8: mod_base = OTHER; note = sugar modification: 2'-O-methoxyethylribose; note = backbone modification: 5'-phosphorothioate
  modified_base 9: mod_base = OTHER; note = sugar modification: lna; note = thymine; note = backbone modification: 5'-phosphorothioate
  modified_base 10: mod_base = OTHER; note = sugar modification: 2'-O-methoxyethylribose; note = backbone modification: 5'-phosphorothioate
  modified_base 11: mod_base = m5c; mod_base = OTHER; note = sugar modification: 2'-O-methoxyethylribose; note = backbone modification: 5'-phosphorothioate
  modified_base 12: mod_base = OTHER; note = thymine; note = backbone modification: 5'-phosphorothioate; note = sugar modification: lna
  modified_base 13: mod_base = OTHER; note = thymine; note = sugar modification: 2'-O-methoxyethylribose; note = backbone modification: 5'-phosphorothioate
  modified_base 14: mod_base = m5c; mod_base = OTHER; note = backbone modification: 5'-phosphorothioate; note = sugar modification: lna
  modified_base 15: mod_base = OTHER; note = backbone modification: 5'-phosphorothioate; note = sugar modification: 2'-O-methoxyethylribose
  modified_base 16: mod_base = OTHER; note = thymine; note = sugar modification: 2'-O-methoxyethylribose
tgttcttgtacttcat

SEQ ID NO: 731 - RNA, 16 nt, synthetic construct
  source 1..16: mol_type = other RNA; note = Antisense oligonucleotide
  modified_base 1: mod_base = OTHER; note = thymine; note = backbone modification: 5'-phosphorothioate; note = sugar modification: lna
  modified_base 2: mod_base = OTHER; note = backbone modification: 5'-phosphorothioate; note = sugar modification: 2'-O-methoxyethylribose
  modified_base 3: mod_base = OTHER; note = thymine; note = sugar modification: 2'-O-methoxyethylribose; note = backbone modification: 5'-phosphorothioate
  modified_base 4: mod_base = OTHER; note = thymine; note = backbone modification: 5'-phosphorothioate; note = sugar modification: 2'-O-methoxyethylribose
  modified_base 5: mod_base = OTHER; mod_base = m5c; note = backbone modification: 5'-phosphorothioate; note = sugar modification: 2'-O-methoxyethylribose
  modified_base 6: mod_base = OTHER; note = backbone modification: 5'-phosphorothioate; note = thymine; note = sugar modification: lna
  modified_base 7: mod_base = OTHER; note = sugar modification: lna; note = thymine; note = backbone modification: 5'-phosphorothioate
  modified_base 8: mod_base = OTHER; note = sugar modification: 2'-O-methoxyethylribose; note = backbone modification: 5'-phosphorothioate
  modified_base 9: mod_base = OTHER; note = backbone modification: 5'-phosphorothioate; note = thymine; note = sugar modification: 2'-O-methoxyethylribose
  modified_base 10: mod_base = OTHER; note = sugar modification: lna; note = backbone modification: 5'-phosphorothioate
  modified_base 11: mod_base = OTHER; mod_base = m5c; note = sugar modification: 2'-O-methoxyethylribose; note = backbone modification: 5'-phosphorothioate
  modified_base 12: mod_base = OTHER; note = backbone modification: 5'-phosphorothioate; note = thymine; note = sugar modification: 2'-O-methoxyethylribose
  modified_base 13: mod_base = OTHER; note = sugar modification: 2'-O-methoxyethylribose; note = backbone modification: 5'-phosphorothioate; note = thymine
  modified_base 14: mod_base = m5c; mod_base = OTHER; note = backbone modification: 5'-phosphorothioate; note = sugar modification: 2'-O-methoxyethylribose
  modified_base 15: mod_base = OTHER; note = sugar modification: 2'-O-methoxyethylribose; note = backbone modification: 5'-phosphorothioate
  modified_base 16: mod_base = OTHER; note = thymine; note = sugar modification: 2'-O-methoxyethylribose
tgttcttgtacttcat

SEQ ID NO: 732 - RNA, 16 nt, synthetic construct
  source 1..16: mol_type = other RNA; note = Antisense oligonucleotide
  modified_base 1: mod_base = OTHER; note = thymine; note = backbone modification: 5'-phosphorothioate; note = sugar modification: 2'-O-methoxyethylribose
  modified_base 2: mod_base = OTHER; note = backbone modification: 5'-phosphorothioate; note = sugar modification: 2'-O-methoxyethylribose
  modified_base 3: mod_base = OTHER; note = sugar modification: 2'-O-methoxyethylribose; note = backbone modification: 5'-phosphorothioate; note = thymine
  modified_base 4: mod_base = OTHER; note = thymine; note = backbone modification: 5'-phosphorothioate; note = sugar modification: 2'-O-methoxyethylribose
  modified_base 5: mod_base = m5c; mod_base = OTHER; note = sugar modification: lna; note = backbone modification: 5'-phosphorothioate
  modified_base 6: mod_base = OTHER; note = thymine; note = sugar modification: lna; note = backbone modification: 5'-phosphorothioate
  modified_base 7: mod_base = OTHER; note = thymine; note = backbone modification: 5'-phosphorothioate; note = sugar modification: 2'-O-methoxyethylribose
  modified_base 8: mod_base = OTHER; note = backbone modification: 5'-phosphorothioate; note = sugar modification: lna
  modified_base 9: mod_base = OTHER; note = sugar modification: 2'-O-methoxyethylribose; note = thymine; note = backbone modification: 5'-phosphorothioate
  modified_base 10: mod_base = OTHER; note = sugar modification: 2'-O-methoxyethylribose; note = backbone modification: 5'-phosphorothioate
  modified_base 11: mod_base = m5c; mod_base = OTHER; note = sugar modification: lna; note = backbone modification: 5'-phosphorothioate
  modified_base 12: mod_base = OTHER; note = thymine; note = sugar modification: 2'-O-methoxyethylribose; note = backbone modification: 5'-phosphorothioate
  modified_base 13: mod_base = OTHER; note = backbone modification: 5'-phosphorothioate; note = sugar modification: 2'-O-methoxyethylribose; note = thymine
  modified_base 14: mod_base = m5c; mod_base = OTHER; note = sugar modification: 2'-O-methoxyethylribose; note = backbone modification: 5'-phosphorothioate
  modified_base 15: mod_base = OTHER; note = backbone modification: 5'-phosphorothioate; note = sugar modification: 2'-O-methoxyethylribose
  modified_base 16: mod_base = OTHER; note = sugar modification: 2'-O-methoxyethylribose; note = thymine
tgttcttgtacttcat

SEQ ID NO: 733 - RNA, 16 nt, synthetic construct
  source 1..16: mol_type = other RNA; note = Antisense oligonucleotide
  modified_base 1: mod_base = OTHER; note = sugar modification: 2'-O-methoxyethylribose; note = thymine; note = backbone modification: 5'-phosphorothioate
  modified_base 2: mod_base = OTHER; note = sugar modification: lna; note = backbone modification: 5'-phosphorothioate
  modified_base 3: mod_base = OTHER; note = backbone modification: 5'-phosphorothioate; note = thymine; note = sugar modification: 2'-O-methoxyethylribose
  modified_base 4: mod_base = OTHER; note = thymine; note = backbone modification: 5'-phosphorothioate; note = sugar modification: 2'-O-methoxyethylribose
  modified_base 5: mod_base = OTHER; mod_base = m5c; note = sugar modification: 2'-O-methoxyethylribose; note = backbone modification: 5'-phosphorothioate
  modified_base 6: mod_base = OTHER; note = sugar modification: 2'-O-methoxyethylribose; note = backbone modification: 5'-phosphorothioate; note = thymine
  modified_base 7: mod_base = OTHER; note = backbone modification: 5'-phosphorothioate; note = thymine; note = sugar modification: 2'-O-methoxyethylribose
  modified_base 8: mod_base = OTHER; note = sugar modification: 2'-O-methoxyethylribose; note = backbone modification: 5'-phosphorothioate
  modified_base 9: mod_base = OTHER; note = backbone modification: 5'-phosphorothioate; note = thymine; note = sugar modification: lna
  modified_base 10: mod_base = OTHER; note = backbone modification: 5'-phosphorothioate; note = sugar modification: lna
  modified_base 11: mod_base = OTHER; mod_base = m5c; note = sugar modification: 2'-O-methoxyethylribose; note = backbone modification: 5'-phosphorothioate
  modified_base 12: mod_base = OTHER; note = thymine; note = sugar modification: 2'-O-methoxyethylribose; note = backbone modification: 5'-phosphorothioate
  modified_base 13: mod_base = OTHER; note = sugar modification: 2'-O-methoxyethylribose; note = thymine; note = backbone modification: 5'-phosphorothioate
  modified_base 14: mod_base = m5c; mod_base = OTHER; note = backbone modification: 5'-phosphorothioate; note = sugar modification: 2'-O-methoxyethylribose
  modified_base 15: mod_base = OTHER; note = sugar modification: 2'-O-methoxyethylribose; note = backbone modification: 5'-phosphorothioate
  modified_base 16: mod_base = OTHER; note = sugar modification: lna; note = thymine
tgttcttgtacttcat

SEQ ID NO: 734 - RNA, 16 nt, synthetic construct
  source 1..16: mol_type = other RNA; note = Antisense oligonucleotide
  modified_base 1: mod_base = OTHER; note = sugar modification: 2'-O-methoxyethylribose; note = thymine; note = backbone modification: 5'-phosphorothioate
  modified_base 2: mod_base = OTHER; note = backbone modification: 5'-phosphorothioate; note = sugar modification: lna
  modified_base 3: mod_base = OTHER; note = backbone modification: 5'-phosphorothioate; note = sugar modification: lna; note = thymine
  modified_base 4: mod_base = OTHER; note = thymine; note = sugar modification: lna; note = backbone modification: 5'-phosphorothioate
  modified_base 5: mod_base = OTHER; mod_base = m5c; note = sugar modification: 2'-O-methoxyethylribose; note = backbone modification: 5'-phosphorothioate
  modified_base 6: mod_base = OTHER; note = backbone modification: 5'-phosphorothioate; note = thymine; note = sugar modification: 2'-O-methoxyethylribose
  modified_base 7: mod_base = OTHER; note = backbone modification: 5'-phosphorothioate; note = sugar modification: 2'-O-methoxyethylribose; note = thymine
  modified_base 8: mod_base = OTHER; note = sugar modification: lna; note = backbone modification: 5'-phosphorothioate
  modified_base 9: mod_base = OTHER; note = backbone modification: 5'-phosphorothioate; note = sugar modification: 2'-O-methoxyethylribose; note = thymine
  modified_base 10: mod_base = OTHER; note = sugar modification: 2'-O-methoxyethylribose; note = backbone modification: 5'-phosphorothioate
  modified_base 11: mod_base = OTHER; mod_base = m5c; note = sugar modification: 2'-O-methoxyethylribose; note = backbone modification: 5'-phosphorothioate
  modified_base 12: mod_base = OTHER; note = sugar modification: 2'-O-methoxyethylribose; note = thymine; note = backbone modification: 5'-phosphorothioate
  modified_base 13: mod_base = OTHER; note = thymine; note = backbone modification: 5'-phosphorothioate; note = sugar modification: 2'-O-methoxyethylribose
  modified_base 14: mod_base = m5c; mod_base = OTHER; note = backbone modification: 5'-phosphorothioate; note = sugar modification: 2'-O-methoxyethylribose
  modified_base 15: mod_base = OTHER; note = backbone modification: 5'-phosphorothioate; note = sugar modification: 2'-O-methoxyethylribose
  modified_base 16: mod_base = OTHER; note = thymine; note = sugar modification: 2'-O-methoxyethylribose
tgttcttgtacttcat

SEQ ID NO: 735 - RNA, 16 nt, synthetic construct
  source 1..16: mol_type = other RNA; note = Antisense oligonucleotide
  modified_base 1: mod_base = OTHER; note = backbone modification: 5'-phosphorothioate; note = sugar modification: 2'-O-methoxyethylribose; note = thymine
  modified_base 2: mod_base = OTHER; note = sugar modification: 2'-O-methoxyethylribose; note = backbone modification: 5'-phosphorothioate
  modified_base 3: mod_base = OTHER; note = sugar modification: 2'-O-methoxyethylribose; note = backbone modification: 5'-phosphorothioate; note = thymine
  modified_base 4: mod_base = OTHER; note = sugar modification: 2'-O-methoxyethylribose; note = thymine; note = backbone modification: 5'-phosphorothioate
  modified_base 5: mod_base = OTHER; mod_base = m5c; note = sugar modification: lna; note = backbone modification: 5'-phosphorothioate
  modified_base 6: mod_base = OTHER; note = backbone modification: 5'-phosphorothioate; note = thymine; note = sugar modification: lna
  modified_base 7: mod_base = OTHER; note = sugar modification: 2'-O-methoxyethylribose; note = backbone modification: 5'-phosphorothioate; note = thymine
  modified_base 8: mod_base = OTHER; note = backbone modification: 5'-phosphorothioate; note = sugar modification: 2'-O-methoxyethylribose
  modified_base 9: mod_base = OTHER; note = backbone modification: 5'-phosphorothioate; note = thymine; note = sugar modification: 2'-O-methoxyethylribose
  modified_base 10: mod_base = OTHER; note = sugar modification: lna; note = backbone modification: 5'-phosphorothioate
  modified_base 11: mod_base = OTHER; mod_base = m5c; note = backbone modification: 5'-phosphorothioate; note = sugar modification: 2'-O-methoxyethylribose
  modified_base 12: mod_base = OTHER; note = thymine; note = sugar modification: 2'-O-methoxyethylribose; note = backbone modification: 5'-phosphorothioate
  modified_base 13: mod_base = OTHER; note = backbone modification: 5'-phosphorothioate; note = thymine; note = sugar modification: lna
  modified_base 14: mod_base = OTHER; mod_base = m5c; note = backbone modification: 5'-phosphorothioate; note = sugar modification: 2'-O-methoxyethylribose
  modified_base 15: mod_base = OTHER; note = backbone modification: 5'-phosphorothioate; note = sugar modification: 2'-O-methoxyethylribose
  modified_base 16: mod_base = OTHER; note = thymine; note = sugar modification: 2'-O-methoxyethylribose
tgttcttgtacttcat

SEQ ID NO: 736 - RNA, 16 nt, synthetic construct
  source 1..16: mol_type = other RNA; note = Antisense oligonucleotide
  modified_base 1: mod_base = OTHER; note = backbone modification: 5'-phosphorothioate; note = sugar modification: 2'-O-methoxyethylribose; note = thymine
  modified_base 2: mod_base = OTHER; note = backbone modification: 5'-phosphorothioate; note = sugar modification: 2'-O-methoxyethylribose
  modified_base 3: mod_base = OTHER; note = backbone modification: 5'-phosphorothioate; note = thymine; note = sugar modification: 2'-O-methoxyethylribose
  modified_base 4: mod_base = OTHER; note = backbone modification: 5'-phosphorothioate; note = thymine; note = sugar modification: 2'-O-methoxyethylribose
  modified_base 5: mod_base = m5c; mod_base = OTHER; note = sugar modification: 2'-O-methoxyethylribose; note = backbone modification: 5'-phosphorothioate
  modified_base 6: mod_base = OTHER; note = sugar modification: 2'-O-methoxyethylribose; note = thymine; note = backbone modification: 5'-phosphorothioate
  modified_base 7: mod_base = OTHER; note = sugar modification: 2'-O-methoxyethylribose; note = backbone modification: 5'-phosphorothioate; note = thymine
  modified_base 8: mod_base = OTHER; note = sugar modification: lna; note = backbone modification: 5'-phosphorothioate
  modified_base 9: mod_base = OTHER; note = sugar modification: lna; note = backbone modification: 5'-phosphorothioate; note = thymine
  modified_base 10: mod_base = OTHER; note = sugar modification: 2'-O-methoxyethylribose; note = backbone modification: 5'-phosphorothioate
  modified_base 11: mod_base = m5c; mod_base = OTHER; note = backbone modification: 5'-phosphorothioate; note = sugar modification: 2'-O-methoxyethylribose
  modified_base 12: mod_base = OTHER; note = thymine; note = backbone modification: 5'-phosphorothioate; note = sugar modification: 2'-O-methoxyethylribose
  modified_base 13: mod_base = OTHER; note = sugar modification: lna; note = backbone modification: 5'-phosphorothioate; note = thymine
  modified_base 14: mod_base = OTHER; mod_base = m5c; note = backbone modification: 5'-phosphorothioate; note = sugar modification: lna
  modified_base 15: mod_base = OTHER; note = sugar modification: 2'-O-methoxyethylribose; note = backbone modification: 5'-phosphorothioate
  modified_base 16: mod_base = OTHER; note = sugar modification: 2'-O-methoxyethylribose; note = thymine
tgttcttgtacttcat

SEQ ID NO: 737 - RNA, 16 nt, synthetic construct
  source 1..16: mol_type = other RNA; note = Antisense oligonucleotide
  modified_base 1: mod_base = OTHER; note = thymine; note = backbone modification: 5'-phosphorothioate; note = sugar modification: 2'-O-methoxyethylribose
  modified_base 2: mod_base = OTHER; note = sugar modification: 2'-O-methoxyethylribose; note = backbone modification: 5'-phosphorothioate
  modified_base 3: mod_base = OTHER; note = backbone modification: 5'-phosphorothioate; note = sugar modification: lna; note = thymine
  modified_base 4: mod_base = OTHER; note = sugar modification: 2'-O-methoxyethylribose; note = backbone modification: 5'-phosphorothioate; note = thymine
  modified_base 5: mod_base = OTHER; mod_base = m5c; note = backbone modification: 5'-phosphorothioate; note = sugar modification: 2'-O-methoxyethylribose
  modified_base 6: mod_base = OTHER; note = sugar modification: 2'-O-methoxyethylribose; note = backbone modification: 5'-phosphorothioate; note = thymine
  modified_base 7: mod_base = OTHER; note = thymine; note = backbone modification: 5'-phosphorothioate; note = sugar modification: lna
  modified_base 8: mod_base = OTHER; note = sugar modification: 2'-O-methoxyethylribose; note = backbone modification: 5'-phosphorothioate
  modified_base 9: mod_base = OTHER; note = sugar modification: 2'-O-methoxyethylribose; note = thymine; note = backbone modification: 5'-phosphorothioate
  modified_base 10: mod_base = OTHER; note = sugar modification: lna; note = backbone modification: 5'-phosphorothioate
  modified_base 11: mod_base = OTHER; mod_base = m5c; note = sugar modification: 2'-O-methoxyethylribose; note = backbone modification: 5'-phosphorothioate
  modified_base 12: mod_base = OTHER; note = sugar modification: 2'-O-methoxyethylribose; note = backbone modification: 5'-phosphorothioate; note = thymine
  modified_base 13: mod_base = OTHER; note = thymine; note = backbone modification: 5'-phosphorothioate; note = sugar modification: lna
  modified_base 14: mod_base = OTHER; mod_base = m5c; note = sugar modification: 2'-O-methoxyethylribose; note = backbone modification: 5'-phosphorothioate
  modified_base 15: mod_base = OTHER; note = backbone modification: 5'-phosphorothioate; note = sugar modification: 2'-O-methoxyethylribose
  modified_base 16: mod_base = OTHER; note = sugar modification: 2'-O-methoxyethylribose; note = thymine
tgttcttgtacttcat

SEQ ID NO: 738 - RNA, 15 nt, synthetic construct
  source 1..15: mol_type = other RNA; note = Antisense oligonucleotide
  modified_base 1: mod_base = OTHER; mod_base = m5c; note = backbone modification: 5'-phosphorothioate; note = sugar modification: lna
  modified_base 2: mod_base = OTHER; note = thymine; note = sugar modification: 2'-O-methoxyethylribose; note = backbone modification: 5'-phosphorothioate
  modified_base 3: mod_base = OTHER; note = backbone modification: 5'-phosphorothioate; note = thymine; note = sugar modification: 2'-O-methoxyethylribose
  modified_base 4: mod_base = OTHER; note = backbone modification: 5'-phosphorothioate; note = sugar modification: 2'-O-methoxyethylribose
  modified_base 5: mod_base = OTHER; note = backbone modification: 5'-phosphorothioate; note = sugar modification: 2'-O-methoxyethylribose; note = thymine
  modified_base 6: mod_base = OTHER; note = sugar modification: 2'-O-methoxyethylribose; note = backbone modification: 5'-phosphorothioate
  modified_base 7: mod_base = OTHER; mod_base = m5c; note = sugar modification: 2'-O-methoxyethylribose; note = backbone modification: 5'-phosphorothioate
  modified_base 8: mod_base = OTHER; note = thymine; note = backbone modification: 5'-phosphorothioate; note = sugar modification: 2'-O-methoxyethylribose
  modified_base 9: mod_base = OTHER; note = backbone modification: 5'-phosphorothioate; note = thymine; note = sugar modification: 2'-O-methoxyethylribose
  modified_base 10: mod_base = m5c; mod_base = OTHER; note = backbone modification: 5'-phosphorothioate; note = sugar modification: 2'-O-methoxyethylribose
  modified_base 11: mod_base = OTHER; note = sugar modification: 2'-O-methoxyethylribose; note = backbone modification: 5'-phosphorothioate
  modified_base 12: mod_base = OTHER; note = sugar modification: 2'-O-methoxyethylribose; note = thymine; note = backbone modification: 5'-phosphorothioate
  modified_base 13: mod_base = OTHER; mod_base = m5c; note = sugar modification: 2'-O-methoxyethylribose; note = backbone modification: 5'-phosphorothioate
  modified_base 14: mod_base = OTHER; mod_base = m5c; note = backbone modification: 5'-phosphorothioate; note = sugar modification: 2'-O-methoxyethylribose
  modified_base 15: mod_base = m5c; mod_base = OTHER; note = sugar modification: lna
cttgtacttcatccc

SEQ ID NO: 739 - RNA, 15 nt, synthetic construct
  source 1..15: mol_type = other RNA; note = Antisense oligonucleotide
  modified_base 1: mod_base = OTHER; mod_base = m5c; note = backbone modification: 5'-phosphorothioate; note = sugar modification: lna
  modified_base 2: mod_base = OTHER; note = sugar modification: lna; note = backbone modification: 5'-phosphorothioate; note = thymine
  modified_base 3: mod_base = OTHER; note = thymine; note = sugar modification: 2'-O-methoxyethylribose; note = backbone modification: 5'-phosphorothioate
  modified_base 4: mod_base = OTHER; note = sugar modification: 2'-O-methoxyethylribose; note = backbone modification: 5'-phosphorothioate
  modified_base 5: mod_base = OTHER; note = backbone modification: 5'-phosphorothioate; note = thymine; note = sugar modification: 2'-O-methoxyethylribose
  modified_base 6: mod_base = OTHER; note = sugar modification: 2'-O-methoxyethylribose; note = backbone modification: 5'-phosphorothioate
  modified_base 7: mod_base = OTHER; mod_base = m5c; note = backbone modification: 5'-phosphorothioate; note = sugar modification: 2'-O-methoxyethylribose
  modified_base 8: mod_base = OTHER; note = thymine; note = sugar modification: 2'-O-methoxyethylribose; note = backbone modification: 5'-phosphorothioate
  modified_base 9: mod_base = OTHER; note = sugar modification: 2'-O-methoxyethylribose; note = backbone modification: 5'-phosphorothioate; note = thymine
  modified_base 10: mod_base = m5c; mod_base = OTHER; note = backbone modification: 5'-phosphorothioate; note = sugar modification: 2'-O-methoxyethylribose
  modified_base 11: mod_base = OTHER; note = backbone modification: 5'-phosphorothioate; note = sugar modification: 2'-O-methoxyethylribose
  modified_base 12: mod_base = OTHER; note = backbone modification: 5'-phosphorothioate; note = sugar modification: 2'-O-methoxyethylribose; note = thymine
  modified_base 13: mod_base = OTHER; mod_base = m5c; note = sugar modification: 2'-O-methoxyethylribose; note = backbone modification: 5'-phosphorothioate
  modified_base 14: mod_base = OTHER; mod_base = m5c; note = sugar modification: lna; note = backbone modification: 5'-phosphorothioate
  modified_base 15: mod_base = m5c; mod_base = OTHER; note = sugar modification: lna
cttgtacttcatccc

SEQ ID NO: 740 - RNA, 15 nt, synthetic construct
  source 1..15: mol_type = other RNA; note = Antisense oligonucleotide
  modified_base 1: mod_base = OTHER; mod_base = m5c; note = backbone modification: 5'-phosphorothioate; note = sugar modification: lna
  modified_base 2: mod_base = OTHER; note = thymine; note = sugar modification: 2'-O-methoxyethylribose; note = backbone modification: 5'-phosphorothioate
  modified_base 3: mod_base = OTHER; note = thymine; note = backbone modification: 5'-phosphorothioate; note = sugar modification: 2'-O-methoxyethylribose
  modified_base 4: mod_base = OTHER; note = backbone modification: 5'-phosphorothioate; note = sugar modification: 2'-O-methoxyethylribose
  modified_base 5: mod_base = OTHER; note = thymine; note = sugar modification: 2'-O-methoxyethylribose; note = backbone modification: 5'-phosphorothioate
  modified_base 6: mod_base = OTHER; note = sugar modification: 2'-O-methoxyethylribose; note = backbone modification: 5'-phosphorothioate
  modified_base 7: mod_base = OTHER; mod_base = m5c; note = backbone modification: 5'-phosphorothioate; note = sugar modification: 2'-O-methoxyethylribose
  modified_base 8: mod_base = OTHER; note = backbone modification: 5'-phosphorothioate; note = sugar modification: 2'-O-methoxyethylribose; note = thymine
  modified_base 9: mod_base = OTHER; note = thymine; note = backbone modification: 5'-phosphorothioate; note = sugar modification: 2'-O-methoxyethylribose
  modified_base 10: mod_base = OTHER; mod_base = m5c; note = backbone modification: 5'-phosphorothioate; note = sugar modification: 2'-O-methoxyethylribose
  modified_base 11: mod_base = OTHER; note = backbone modification: 5'-phosphorothioate; note = sugar modification: 2'-O-methoxyethylribose
  modified_base 12: mod_base = OTHER; note = sugar modification: 2'-O-methoxyethylribose; note = backbone modification: 5'-phosphorothioate; note = thymine
  modified_base 13: mod_base = OTHER; mod_base = m5c; note = backbone modification: 5'-phosphorothioate; note = sugar modification: 2'-O-methoxyethylribose
  modified_base 14: mod_base = m5c; mod_base = OTHER; note = sugar modification: lna; note = backbone modification: 5'-phosphorothioate
  modified_base 15: mod_base = OTHER; mod_base = m5c; note = sugar modification: lna
cttgtacttcatccc

SEQ ID NO: 741 - RNA, 15 nt, synthetic construct
  source 1..15: mol_type = other RNA; note = Antisense oligonucleotide
  modified_base 1: mod_base = m5c; mod_base = OTHER; note = backbone modification: 5'-phosphorothioate; note = sugar modification: lna
  modified_base 2: mod_base = OTHER; note = sugar modification: lna; note = thymine; note = backbone modification: 5'-phosphorothioate
  modified_base 3: mod_base = OTHER; note = sugar modification: 2'-O-methoxyethylribose; note = thymine; note = backbone modification: 5'-phosphorothioate
  modified_base 4: mod_base = OTHER; note = sugar modification: 2'-O-methoxyethylribose; note = backbone modification: 5'-phosphorothioate
  modified_base 5: mod_base = OTHER; note = thymine; note = backbone modification: 5'-phosphorothioate; note = sugar modification: 2'-O-methoxyethylribose
  modified_base 6: mod_base = OTHER; note = sugar modification: 2'-O-methoxyethylribose; note = backbone modification: 5'-phosphorothioate
  modified_base 7: mod_base = m5c; mod_base = OTHER; note = backbone modification: 5'-phosphorothioate; note = sugar modification: 2'-O-methoxyethylribose
  modified_base 8: mod_base = OTHER; note = sugar modification: 2'-O-methoxyethylribose; note = thymine; note = backbone modification: 5'-phosphorothioate
  modified_base 9: mod_base = OTHER; note = backbone modification: 5'-phosphorothioate; note = thymine; note = sugar modification: 2'-O-methoxyethylribose
  modified_base 10: mod_base = OTHER; mod_base = m5c; note = sugar modification: 2'-O-methoxyethylribose; note = backbone modification: 5'-phosphorothioate
  modified_base 11: mod_base = OTHER; note = sugar modification: 2'-O-methoxyethylribose; note = backbone modification: 5'-phosphorothioate
  modified_base 12: mod_base = OTHER; note = backbone modification: 5'-phosphorothioate; note = thymine; note = sugar modification: 2'-O-methoxyethylribose
  modified_base 13: mod_base = OTHER; mod_base = m5c; note = sugar modification: 2'-O-methoxyethylribose; note = backbone modification: 5'-phosphorothioate
  modified_base 14: mod_base = m5c; mod_base = OTHER; note = sugar modification: 2'-O-methoxyethylribose; note = backbone modification: 5'-phosphorothioate
  modified_base 15: mod_base = m5c; mod_base = OTHER; note = sugar modification: lna
cttgtacttcatccc

SEQ ID NO: 742 - RNA, 15 nt, synthetic construct
  source 1..15: mol_type = other RNA; note = Antisense oligonucleotide
  modified_base 1: mod_base = m5c; mod_base = OTHER; note = backbone modification: 5'-phosphorothioate; note = sugar modification: 2'-O-methoxyethylribose
  modified_base 2: mod_base = OTHER; note = backbone modification: 5'-phosphorothioate; note = sugar modification: lna; note = thymine
  modified_base 3: mod_base = OTHER; note = backbone modification: 5'-phosphorothioate; note = thymine; note = sugar modification: 2'-O-methoxyethylribose
  modified_base 4: mod_base = OTHER; note = backbone modification: 5'-phosphorothioate; note = sugar modification: 2'-O-methoxyethylribose
  modified_base 5: mod_base = OTHER; note = backbone modification: 5'-phosphorothioate; note = thymine; note = sugar modification: 2'-O-methoxyethylribose
  modified_base 6: mod_base = OTHER; note = backbone modification: 5'-phosphorothioate; note = sugar modification: lna
  modified_base 7: mod_base = m5c; mod_base = OTHER; note = sugar modification: lna; note = backbone modification: 5'-phosphorothioate
  modified_base 8: mod_base = OTHER; note = backbone modification: 5'-phosphorothioate; note = thymine; note = sugar modification: 2'-O-methoxyethylribose
  modified_base 9: mod_base = OTHER; note = sugar modification: 2'-O-methoxyethylribose; note = backbone modification: 5'-phosphorothioate; note = thymine
  modified_base 10: mod_base = OTHER; mod_base = m5c; note = backbone modification: 5'-phosphorothioate; note = sugar modification: 2'-O-methoxyethylribose
  modified_base 11: mod_base = OTHER; note = backbone modification: 5'-phosphorothioate; note = sugar modification: 2'-O-methoxyethylribose
  modified_base 12: mod_base = OTHER; note = backbone modification: 5'-phosphorothioate; note = thymine; note = sugar modification: 2'-O-methoxyethylribose
  modified_base 13: mod_base = m5c; mod_base = OTHER; note = backbone modification: 5'-phosphorothioate; note = sugar modification: 2'-O-methoxyethylribose
  modified_base 14: mod_base = m5c; mod_base = OTHER; note = backbone modification: 5'-phosphorothioate; note = sugar modification: 2'-O-methoxyethylribose
  modified_base 15: mod_base = m5c; mod_base = OTHER; note = sugar modification: 2'-O-methoxyethylribose
cttgtacttcatccc

SEQ ID NO: 743 - RNA, 15 nt, synthetic construct
  source 1..15: mol_type = other RNA; note = Antisense oligonucleotide
  modified_base 1: mod_base = m5c; mod_base = OTHER; note = sugar modification: lna; note = backbone modification: 5'-phosphorothioate
  modified_base 2: mod_base = OTHER; note = backbone modification: 5'-phosphorothioate; note = thymine; note = sugar modification: 2'-O-methoxyethylribose
  modified_base 3: mod_base = OTHER; note = thymine; note = backbone modification: 5'-phosphorothioate; note = sugar modification: 2'-O-methoxyethylribose
  modified_base 4: mod_base = OTHER; note = backbone modification: 5'-phosphorothioate; note = sugar modification: 2'-O-methoxyethylribose
  modified_base 5: mod_base = OTHER; note = backbone modification: 5'-phosphorothioate; note = sugar modification: lna; note = thymine
  modified_base 6: mod_base = OTHER; note = sugar modification: lna; note = backbone modification: 5'-phosphorothioate
  modified_base 7: mod_base = OTHER; mod_base = m5c; note = backbone modification: 5'-phosphorothioate; note = sugar modification: 2'-O-methoxyethylribose
  modified_base 8: mod_base = OTHER; note = sugar modification: 2'-O-methoxyethylribose; note = backbone modification: 5'-phosphorothioate; note = thymine
  modified_base 9: mod_base = OTHER; note = backbone modification: 5'-phosphorothioate; note = thymine; note = sugar modification: 2'-O-methoxyethylribose
  modified_base 10: mod_base = m5c; mod_base = OTHER; note = backbone modification: 5'-phosphorothioate; note = sugar modification: 2'-O-methoxyethylribose
  modified_base 11: mod_base = OTHER; note = sugar modification: 2'-O-methoxyethylribose; note = backbone modification: 5'-phosphorothioate
  modified_base 12: mod_base = OTHER; note = backbone modification: 5'-phosphorothioate; note = sugar modification: 2'-O-methoxyethylribose; note = thymine
  modified_base 13: mod_base = OTHER; mod_base = m5c; note = sugar modification: 2'-O-methoxyethylribose; note = backbone modification: 5'-phosphorothioate
  modified_base 14: mod_base = OTHER; mod_base = m5c; note = backbone modification: 5'-phosphorothioate; note = sugar modification: 2'-O-methoxyethylribose
  modified_base 15: mod_base = OTHER; mod_base = m5c; note = sugar modification: 2'-O-methoxyethylribose
cttgtacttcatccc

SEQ ID NO: 744 - RNA, 15 nt, synthetic construct
  source 1..15: mol_type = other RNA; note = Antisense oligonucleotide
  modified_base 1: mod_base = OTHER; mod_base = m5c; note = backbone modification: 5'-phosphorothioate; note = sugar modification: 2'-O-methoxyethylribose
  modified_base 2: mod_base = OTHER; note = sugar modification: lna; note = backbone modification: 5'-phosphorothioate; note = thymine
  modified_base 3: mod_base = OTHER; note = sugar modification: lna; note = thymine; note = backbone modification: 5'-phosphorothioate
  modified_base 4: mod_base = OTHER; note = backbone modification: 5'-phosphorothioate; note = sugar modification: 2'-O-methoxyethylribose
  modified_base 5: mod_base = OTHER; note = thymine; note = backbone modification: 5'-phosphorothioate; note = sugar modification: 2'-O-methoxyethylribose
  modified_base 6: mod_base = OTHER; note = backbone modification: 5'-phosphorothioate; note = sugar modification: 2'-O-methoxyethylribose
  modified_base 7: mod_base = OTHER; mod_base = m5c; note = backbone modification: 5'-phosphorothioate; note = sugar modification: lna
  modified_base 8: mod_base = OTHER; note = thymine; note = sugar modification: 2'-O-methoxyethylribose; note = backbone modification: 5'-phosphorothioate
  modified_base 9: mod_base = OTHER; note = thymine; note = backbone modification: 5'-phosphorothioate; note = sugar modification: 2'-O-methoxyethylribose
  modified_base 10: mod_base = OTHER; mod_base = m5c; note = sugar modification: 2'-O-methoxyethylribose; note = backbone modification: 5'-phosphorothioate
  modified_base 11: mod_base = OTHER; note = sugar modification: 2'-O-methoxyethylribose; note = backbone modification: 5'-phosphorothioate
  modified_base 12: mod_base = OTHER; note = thymine; note = sugar modification: 2'-O-methoxyethylribose; note = backbone modification: 5'-phosphorothioate
  modified_base 13: mod_base = m5c; mod_base = OTHER; note = sugar modification: 2'-O-methoxyethylribose; note = backbone modification: 5'-phosphorothioate
  modified_base 14: mod_base = m5c; mod_base = OTHER; note = backbone modification: 5'-phosphorothioate; note = sugar modification: 2'-O-methoxyethylribose
  modified_base 15: mod_base = m5c; mod_base = OTHER; note = sugar modification: 2'-O-methoxyethylribose
cttgtacttcatccc

SEQ ID NO: 745 - RNA, 15 nt, synthetic construct
  source 1..15: mol_type = other RNA; note = Antisense oligonucleotide
  modified_base 1: mod_base = OTHER; mod_base = m5c; note = backbone modification: 5'-phosphorothioate; note = sugar modification: 2'-O-methoxyethylribose
  modified_base 2: mod_base = OTHER; note = backbone modification: 5'-phosphorothioate; note = sugar modification: 2'-O-methoxyethylribose; note = thymine
  modified_base 3: mod_base = OTHER; note = backbone modification: 5'-phosphorothioate; note = sugar modification: 2'-O-methoxyethylribose; note = thymine
  modified_base 4: mod_base = OTHER; note = backbone modification: 5'-phosphorothioate; note = sugar modification: lna
  modified_base 5: mod_base = OTHER; note = sugar modification: 2'-O-methoxyethylribose; note = thymine; note = backbone modification: 5'-phosphorothioate
  modified_base 6: mod_base = OTHER; note = backbone modification: 5'-phosphorothioate; note = sugar modification: lna
  modified_base 7: mod_base = OTHER; mod_base = m5c; note = backbone modification: 5'-phosphorothioate; note = sugar modification: 2'-O-methoxyethylribose
  modified_base 8: mod_base = OTHER; note = backbone modification: 5'-phosphorothioate; note = thymine; note = sugar modification: lna
  modified_base 9: mod_base = OTHER; note = thymine; note = sugar modification: 2'-O-methoxyethylribose; note = backbone modification: 5'-phosphorothioate
  modified_base 10: mod_base = m5c; mod_base = OTHER; note = sugar modification: 2'-O-methoxyethylribose; note = backbone modification: 5'-phosphorothioate
  modified_base 11: mod_base = OTHER; note = backbone modification: 5'-phosphorothioate; note = sugar modification: 2'-O-methoxyethylribose
  modified_base 12: mod_base = OTHER; note = sugar modification: 2'-O-methoxyethylribose; note = backbone modification: 5'-phosphorothioate; note = thymine
  modified_base 13: mod_base = OTHER; mod_base = m5c; note = sugar modification: 2'-O-methoxyethylribose; note = backbone modification: 5'-phosphorothioate
  modified_base 14: mod_base = OTHER; mod_base = m5c; note = sugar modification: 2'-O-methoxyethylribose; note = backbone modification: 5'-phosphorothioate
  modified_base 15: mod_base = OTHER; mod_base = m5c; note = sugar modification: 2'-O-methoxyethylribose
cttgtacttcatccc

SEQ ID NO: 746 - RNA, 15 nt, synthetic construct
  source 1..15: mol_type = other RNA; note = Antisense oligonucleotide
  modified_base 1: mod_base = OTHER; mod_base = m5c; note = backbone modification: 5'-phosphorothioate; note = sugar modification: 2'-O-methoxyethylribose
  modified_base 2: mod_base = OTHER; note = sugar modification: 2'-O-methoxyethylribose; note = thymine; note = backbone modification: 5'-phosphorothioate
  modified_base 3: mod_base = OTHER; note = sugar modification: lna; note = thymine; note = backbone modification: 5'-phosphorothioate
  modified_base 4: mod_base = OTHER; note = sugar modification: lna; note = backbone modification: 5'-phosphorothioate
  modified_base 5: mod_base = OTHER; note = thymine; note = backbone modification: 5'-phosphorothioate; note = sugar modification: lna
  modified_base 6: mod_base = OTHER; note = sugar modification: 2'-O-methoxyethylribose; note = backbone modification: 5'-phosphorothioate
  modified_base 7: mod_base = OTHER; mod_base = m5c; note = sugar modification: 2'-O-methoxyethylribose; note = backbone modification: 5'-phosphorothioate
  modified_base 8: mod_base = OTHER; note = thymine; note = sugar modification: lna; note = backbone modification: 5'-phosphorothioate
  modified_base 9: mod_base = OTHER; note = sugar modification: 2'-O-methoxyethylribose; note = thymine; note = backbone modification: 5'-phosphorothioate
  modified_base 10: mod_base = m5c; mod_base = OTHER; note = sugar modification: 2'-O-methoxyethylribose; note = backbone modification: 5'-phosphorothioate
  modified_base 11: mod_base = OTHER; note = backbone modification: 5'-phosphorothioate; note = sugar modification: 2'-O-methoxyethylribose
  modified_base 12: mod_base = OTHER; note = backbone modification: 5'-phosphorothioate; note = sugar modification: 2'-O-methoxyethylribose; note = thymine
  modified_base 13: mod_base = OTHER; mod_base = m5c; note = backbone modification: 5'-phosphorothioate; note = sugar modification: 2'-O-methoxyethylribose
  modified_base 14: mod_base = m5c; mod_base = OTHER; note = backbone modification: 5'-phosphorothioate; note = sugar modification: 2'-O-methoxyethylribose
  modified_base 15: mod_base = OTHER; mod_base = m5c; note = sugar modification: 2'-O-methoxyethylribose
cttgtacttcatccc

SEQ ID NO: 747 - RNA, 15 nt, synthetic construct
  source 1..15: mol_type = other RNA; note = Antisense oligonucleotide
  modified_base 1: mod_base = OTHER; mod_base = m5c; note = backbone modification: 5'-phosphorothioate; note = sugar modification: lna
  modified_base 2: mod_base = OTHER; note = sugar modification: lna; note = backbone modification: 5'-phosphorothioate; note = thymine
  modified_base 3: mod_base = OTHER; note = thymine; note = backbone modification: 5'-phosphorothioate; note = sugar modification: 2'-O-methoxyethylribose
  modified_base 4: mod_base = OTHER; note = sugar modification: 2'-O-methoxyethylribose; note = backbone modification: 5'-phosphorothioate
  modified_base 5: mod_base = OTHER; note = sugar modification: 2'-O-methoxyethylribose; note = backbone modification: 5'-phosphorothioate; note = thymine
  modified_base 6: mod_base = OTHER; note = backbone modification: 5'-phosphorothioate; note = sugar modification: 2'-O-methoxyethylribose
  modified_base 7: mod_base = OTHER; mod_base = m5c; note = sugar modification: lna; note = backbone modification: 5'-phosphorothioate
  modified_base 8: mod_base = OTHER; note = sugar modification: lna; note = backbone modification: 5'-phosphorothioate; note = thymine
  modified_base 9: mod_base = OTHER; note = sugar modification: 2'-O-methoxyethylribose; note = thymine; note = backbone modification: 5'-phosphorothioate
  modified_base 10: mod_base = m5c; mod_base = OTHER; note = sugar modification: 2'-O-methoxyethylribose; note = backbone modification: 5'-phosphorothioate
  modified_base 11: mod_base = OTHER; note = backbone modification: 5'-phosphorothioate; note = sugar modification: 2'-O-methoxyethylribose
  modified_base 12: mod_base = OTHER; note = sugar modification: 2'-O-methoxyethylribose; note = backbone modification: 5'-phosphorothioate; note = thymine
  modified_base 13: mod_base = m5c; mod_base = OTHER; note = backbone modification: 5'-phosphorothioate; note = sugar modification: 2'-O-methoxyethylribose
  modified_base 14: mod_base = m5c; mod_base = OTHER; note = sugar modification: 2'-O-methoxyethylribose; note = backbone modification: 5'-phosphorothioate
  modified_base 15: mod_base = OTHER; mod_base = m5c; note = sugar modification: 2'-O-methoxyethylribose
cttgtacttcatccc

SEQ ID NO: 748 - RNA, 15 nt, synthetic construct
  source 1..15: mol_type = other RNA; note = Antisense oligonucleotide
  modified_base 1: mod_base = OTHER; mod_base = m5c; note = sugar modification: 2'-O-methoxyethylribose; note = backbone modification: 5'-phosphorothioate
  modified_base 2: mod_base = OTHER; note = sugar modification: lna; note = thymine; note = backbone modification: 5'-phosphorothioate
  modified_base 3: mod_base = OTHER; note = sugar modification: lna; note = backbone modification: 5'-phosphorothioate; note = thymine
  modified_base 4: mod_base = OTHER; note = backbone modification: 5'-phosphorothioate; note = sugar modification: lna
  modified_base 5: mod_base = OTHER; note = backbone modification: 5'-phosphorothioate; note = sugar modification: 2'-O-methoxyethylribose; note = thymine
  modified_base 6: mod_base = OTHER; note = backbone modification: 5'-phosphorothioate; note = sugar modification: 2'-O-methoxyethylribose
  modified_base 7: mod_base = OTHER; mod_base = m5c; note = sugar modification: lna; note = backbone modification: 5'-phosphorothioate
  modified_base 8: mod_base = OTHER; note = thymine; note = sugar modification: 2'-O-methoxyethylribose; note = backbone modification: 5'-phosphorothioate
  modified_base 9: mod_base = OTHER; note = thymine; note = sugar modification: 2'-O-methoxyethylribose; note = backbone modification: 5'-phosphorothioate
  modified_base 10: mod_base = OTHER; mod_base = m5c; note = backbone modification: 5'-phosphorothioate; note = sugar modification: 2'-O-methoxyethylribose
  modified_base 11: mod_base = OTHER; note = backbone modification: 5'-phosphorothioate; note = sugar modification: 2'-O-methoxyethylribose
  modified_base 12: mod_base = OTHER; note = backbone modification: 5'-phosphorothioate; note = thymine; note = sugar modification: 2'-O-methoxyethylribose
  modified_base 13: mod_base = m5c; mod_base = OTHER; note = sugar modification: 2'-O-methoxyethylribose; note = backbone modification: 5'-phosphorothioate
  modified_base 14: mod_base = OTHER; mod_base = m5c; note = sugar modification: 2'-O-methoxyethylribose; note = backbone modification: 5'-phosphorothioate
  modified_base 15: mod_base = OTHER; mod_base = m5c; note = sugar modification: 2'-O-methoxyethylribose
cttgtacttcatccc

SEQ ID NO: 749 - RNA, 15 nt, synthetic construct
  source 1..15: mol_type = other RNA; note = Antisense oligonucleotide
  modified_base 1: mod_base = m5c; mod_base = OTHER; note = backbone modification: 5'-phosphorothioate; note = sugar modification: lna
  modified_base 2: mod_base = OTHER; note = backbone modification: 5'-phosphorothioate; note = thymine; note = sugar modification: 2'-O-methoxyethylribose
  modified_base 3: mod_base = OTHER; note = backbone modification: 5'-phosphorothioate; note = thymine; note = sugar modification: lna
  modified_base 4: mod_base = OTHER; note = backbone modification: 5'-phosphorothioate; note = sugar modification: 2'-O-methoxyethylribose
  modified_base 5: mod_base = OTHER; note = sugar modification: 2'-O-methoxyethylribose; note = backbone modification: 5'-phosphorothioate; note = thymine
  modified_base 6: mod_base = OTHER; note = backbone modification: 5'-phosphorothioate; note = sugar modification: lna
  modified_base 7: mod_base = m5c; mod_base = OTHER; note = backbone modification: 5'-phosphorothioate; note = sugar modification: 2'-O-methoxyethylribose
  modified_base 8: mod_base = OTHER; note = sugar modification: lna; note = thymine; note = backbone modification: 5'-phosphorothioate
  modified_base 9: mod_base = OTHER; note = backbone modification: 5'-phosphorothioate; note = sugar modification: 2'-O-methoxyethylribose; note = thymine
  modified_base 10: mod_base = m5c; mod_base = OTHER; note = sugar modification: 2'-O-methoxyethylribose; note = backbone modification: 5'-phosphorothioate
  modified_base 11: mod_base = OTHER; note = backbone modification: 5'-phosphorothioate; note = sugar modification: 2'-O-methoxyethylribose
  modified_base 12: mod_base = OTHER; note = sugar modification: 2'-O-methoxyethylribose; note = backbone modification: 5'-phosphorothioate; note = thymine
  modified_base 13: mod_base = OTHER; mod_base = m5c; note = sugar modification: 2'-O-methoxyethylribose; note = backbone modification: 5'-phosphorothioate
  modified_base 14: mod_base = m5c; mod_base = OTHER; note = backbone modification: 5'-phosphorothioate; note = sugar modification: 2'-O-methoxyethylribose
  modified_base 15: mod_base = OTHER; mod_base = m5c; note = sugar modification: 2'-O-methoxyethylribose
cttgtacttcatccc

SEQ ID NO: 750 - RNA, 15 nt, synthetic construct
  source 1..15: mol_type = other RNA; note = Antisense oligonucleotide
  modified_base 1: mod_base = OTHER; mod_base = m5c; note = sugar modification: lna; note = backbone modification: 5'-phosphorothioate
  modified_base 2: mod_base = OTHER; note = thymine; note = backbone modification: 5'-phosphorothioate; note = sugar modification: 2'-O-methoxyethylribose
  modified_base 3: mod_base = OTHER; note = thymine; note = sugar modification: lna; note = backbone modification: 5'-phosphorothioate
  modified_base 4: mod_base = OTHER; note = backbone modification: 5'-phosphorothioate; note = sugar modification: lna
  modified_base 5: mod_base = OTHER; note = thymine; note = sugar modification: lna; note = backbone modification: 5'-phosphorothioate
  modified_base 6: mod_base = OTHER; note = backbone modification: 5'-phosphorothioate; note = sugar modification: 2'-O-methoxyethylribose
  modified_base 7: mod_base = m5c; mod_base = OTHER; note = sugar modification: lna; note = backbone modification: 5'-phosphorothioate
  modified_base 8: mod_base = OTHER; note = backbone modification: 5'-phosphorothioate; note = thymine; note = sugar modification: 2'-O-methoxyethylribose
  modified_base 9: mod_base = OTHER; note = backbone modification: 5'-phosphorothioate; note = thymine; note = sugar modification: 2'-O-methoxyethylribose
  modified_base 10: mod_base = m5c; mod_base = OTHER; note = backbone modification: 5'-phosphorothioate; note = sugar modification: 2'-O-methoxyethylribose
  modified_base 11: mod_base = OTHER; note = backbone modification: 5'-phosphorothioate; note = sugar modification: 2'-O-methoxyethylribose
  modified_base 12: mod_base = OTHER; note = sugar modification: 2'-O-methoxyethylribose; note = backbone modification: 5'-phosphorothioate; note = thymine
  modified_base 13: mod_base = m5c; mod_base = OTHER; note = sugar modification: 2'-O-methoxyethylribose; note = backbone modification: 5'-phosphorothioate
  modified_base 14: mod_base = OTHER; mod_base = m5c; note = backbone modification: 5'-phosphorothioate; note = sugar modification: 2'-O-methoxyethylribose
  modified_base 15: mod_base = m5c; mod_base = OTHER; note = sugar modification: 2'-O-methoxyethylribose
cttgtacttcatccc

SEQ ID NO: 751 - RNA, 15 nt, synthetic construct
  source 1..15: mol_type = other RNA; note = Antisense oligonucleotide
  modified_base 1: mod_base = m5c; mod_base = OTHER; note = backbone modification: 5'-phosphorothioate; note = sugar modification: lna
  modified_base 2: mod_base = OTHER; note = sugar modification: lna; note = backbone modification: 5'-phosphorothioate; note = thymine
  modified_base 3: mod_base = OTHER; note = thymine; note = backbone modification: 5'-phosphorothioate; note = sugar modification: lna
  modified_base 4: mod_base = OTHER; note = backbone modification: 5'-phosphorothioate; note = sugar modification: lna
  modified_base 5: mod_base = OTHER; note = sugar modification: lna; note = thymine; note = backbone modification: 5'-phosphorothioate
  modified_base 6: mod_base = OTHER; note = sugar modification: 2'-O-methoxyethylribose; note = backbone modification: 5'-phosphorothioate
  modified_base 7: mod_base = OTHER; mod_base = m5c; note = sugar modification: 2'-O-methoxyethylribose; note = backbone modification: 5'-phosphorothioate
  modified_base 8: mod_base = OTHER; note = backbone modification: 5'-phosphorothioate; note = thymine; note = sugar modification: 2'-O-methoxyethylribose
  modified_base 9: mod_base = OTHER; note = sugar modification: 2'-O-methoxyethylribose; note = backbone modification: 5'-phosphorothioate; note = thymine
  modified_base 10: mod_base = m5c; mod_base = OTHER; note = backbone modification: 5'-phosphorothioate; note = sugar modification: 2'-O-methoxyethylribose
  modified_base 11: mod_base = OTHER; note = backbone modification: 5'-phosphorothioate; note = sugar modification: 2'-O-methoxyethylribose
  modified_base 12: mod_base = OTHER; note = thymine; note = sugar modification: 2'-O-methoxyethylribose; note = backbone modification: 5'-phosphorothioate
  modified_base 13: mod_base = m5c; mod_base = OTHER; note = sugar modification: 2'-O-methoxyethylribose; note = backbone modification: 5'-phosphorothioate
  modified_base 14: mod_base = OTHER; mod_base = m5c; note = sugar modification: 2'-O-methoxyethylribose; note = backbone modification: 5'-phosphorothioate
  modified_base 15: mod_base = m5c; mod_base = OTHER; note = sugar modification: 2'-O-methoxyethylribose
cttgtacttcatccc

SEQ ID NO: 752 - RNA, 15 nt, synthetic construct
  source 1..15: mol_type = other RNA; note = Antisense oligonucleotide
  modified_base 1: mod_base = m5c; mod_base = OTHER; note = backbone modification: 5'-phosphorothioate; note = sugar modification: lna
  modified_base 2: mod_base = OTHER; note = thymine; note = sugar modification: 2'-O-methoxyethylribose; note = backbone modification: 5'-phosphorothioate
  modified_base 3: mod_base = OTHER; note = backbone modification: 5'-phosphorothioate; note = thymine; note = sugar modification: lna
  modified_base 4: mod_base = OTHER; note = sugar modification: lna; note = backbone modification: 5'-phosphorothioate
  modified_base 5: mod_base = OTHER; note = sugar modification: 2'-O-methoxyethylribose; note = backbone modification: 5'-phosphorothioate; note = thymine
  modified_base 6: mod_base = OTHER; note = sugar modification: lna; note = backbone modification: 5'-phosphorothioate
  modified_base 7: mod_base = OTHER; mod_base = m5c; note = backbone modification: 5'-phosphorothioate; note = sugar modification: 2'-O-methoxyethylribose
  modified_base 8: mod_base = OTHER; note = backbone modification: 5'-phosphorothioate; note = thymine; note = sugar modification: lna
  modified_base 9: mod_base = OTHER; note = sugar modification: 2'-O-methoxyethylribose; note = backbone modification: 5'-phosphorothioate; note = thymine
  modified_base 10: mod_base = OTHER; mod_base = m5c; note = backbone modification: 5'-phosphorothioate; note = sugar modification: 2'-O-methoxyethylribose
  modified_base 11: mod_base = OTHER; note = sugar modification: 2'-O-methoxyethylribose; note = backbone modification: 5'-phosphorothioate
  modified_base 12: mod_base = OTHER; note = sugar modification: 2'-O-methoxyethylribose; note = backbone modification: 5'-phosphorothioate; note = thymine
  modified_base 13: mod_base = m5c; mod_base = OTHER; note = sugar modification: 2'-O-methoxyethylribose; note = backbone modification: 5'-phosphorothioate
  modified_base 14: mod_base = OTHER; mod_base = m5c; note = sugar modification: 2'-O-methoxyethylribose; note = backbone modification: 5'-phosphorothioate
  modified_base 15: mod_base = m5c; mod_base = OTHER; note = sugar modification: 2'-O-methoxyethylribose
cttgtacttcatccc

SEQ ID NO: 753 - RNA, 15 nt, synthetic construct
  source 1..15: mol_type = other RNA; note = Antisense oligonucleotide
  modified_base 1: mod_base = OTHER; mod_base = m5c; note = backbone modification: 5'-phosphorothioate; note = sugar modification: lna
  modified_base 2: mod_base = OTHER; note = sugar modification: lna; note = backbone modification: 5'-phosphorothioate; note = thymine
  modified_base 3: mod_base = OTHER; note = backbone modification: 5'-phosphorothioate; note = sugar modification: lna; note = thymine
  modified_base 4: mod_base = OTHER; note = sugar modification: 2'-O-methoxyethylribose; note = backbone modification: 5'-phosphorothioate
  modified_base 5: mod_base = OTHER; note = backbone modification: 5'-phosphorothioate; note = sugar modification: lna; note = thymine
  modified_base 6: mod_base = OTHER; note = sugar modification: 2'-O-methoxyethylribose; note = backbone modification: 5'-phosphorothioate
  modified_base 7: mod_base = OTHER; mod_base = m5c; note = backbone modification: 5'-phosphorothioate; note = sugar modification: lna
  modified_base 8: mod_base = OTHER; note = sugar modification: 2'-O-methoxyethylribose; note = thymine; note = backbone modification: 5'-phosphorothioate
  modified_base 9: mod_base = OTHER; note = thymine; note = sugar modification: 2'-O-methoxyethylribose; note = backbone modification: 5'-phosphorothioate
  modified_base 10: mod_base = OTHER; mod_base = m5c; note = sugar modification: 2'-O-methoxyethylribose; note = backbone modification: 5'-phosphorothioate
  modified_base 11: mod_base = OTHER; note = sugar modification: 2'-O-methoxyethylribose; note = backbone modification: 5'-phosphorothioate
  modified_base 12: mod_base = OTHER; note = sugar modification: 2'-O-methoxyethylribose; note = backbone modification: 5'-phosphorothioate; note = thymine
  modified_base 13: mod_base = OTHER; mod_base = m5c; note = backbone modification: 5'-phosphorothioate; note = sugar modification: 2'-O-methoxyethylribose
  modified_base 14: mod_base = m5c; mod_base = OTHER; note = sugar modification: 2'-O-methoxyethylribose; note = backbone modification: 5'-phosphorothioate
  modified_base 15: mod_base = OTHER; mod_base = m5c; note = sugar modification: 2'-O-methoxyethylribose
cttgtacttcatccc

SEQ ID NO: 754 - RNA, 15 nt, synthetic construct
  source 1..15: mol_type = other RNA; note = Antisense oligonucleotide
  modified_base 1: mod_base = OTHER; mod_base = m5c; note = sugar modification: lna; note = backbone modification: 5'-phosphorothioate
  modified_base 2: mod_base = OTHER; note = sugar modification: lna; note = thymine; note = backbone modification: 5'-phosphorothioate
  modified_base 3: mod_base = OTHER; note = backbone modification: 5'-phosphorothioate; note = sugar modification: lna; note = thymine
  modified_base 4: mod_base = OTHER; note = backbone modification: 5'-phosphorothioate; note = sugar modification: 2'-O-methoxyethylribose
  modified_base 5: mod_base = OTHER; note = backbone modification: 5'-phosphorothioate; note = thymine; note = sugar modification: lna
  modified_base 6: mod_base = OTHER; note = backbone modification: 5'-phosphorothioate; note = sugar modification: 2'-O-methoxyethylribose
  modified_base 7: mod_base = OTHER; mod_base = m5c; note = sugar modification: 2'-O-methoxyethylribose; note = backbone modification: 5'-phosphorothioate
  modified_base 8: mod_base = OTHER; note = sugar modification: lna; note = backbone modification: 5'-phosphorothioate; note = thymine
  modified_base 9: mod_base = OTHER; note = thymine; note = sugar modification: 2'-O-methoxyethylribose; note = backbone modification: 5'-phosphorothioate
  modified_base 10: mod_base = OTHER; mod_base = m5c; note = sugar modification: 2'-O-methoxyethylribose; note = backbone modification: 5'-phosphorothioate
  modified_base 11: mod_base = OTHER; note = sugar modification: 2'-O-methoxyethylribose; note = backbone modification: 5'-phosphorothioate
  modified_base 12: mod_base = OTHER; note = backbone modification: 5'-phosphorothioate; note = thymine; note = sugar modification: 2'-O-methoxyethylribose
  modified_base 13: mod_base = m5c; mod_base = OTHER; note = sugar modification: 2'-O-methoxyethylribose; note = backbone modification: 5'-phosphorothioate
  modified_base 14: mod_base = m5c; mod_base = OTHER; note = sugar modification: 2'-O-methoxyethylribose; note = backbone modification: 5'-phosphorothioate
  modified_base 15: mod_base = OTHER; mod_base = m5c; note = sugar modification: 2'-O-methoxyethylribose
cttgtacttcatccc

SEQ ID NO: 755 - RNA, 15 nt, synthetic construct
  source 1..15: mol_type = other RNA; note = Antisense oligonucleotide
  modified_base 1: mod_base = m5c; mod_base = OTHER; note = backbone modification: 5'-phosphorothioate; note = sugar modification: lna
  modified_base 2: mod_base = OTHER; note = thymine; note = backbone modification: 5'-phosphorothioate; note = sugar modification: lna
  modified_base 3: mod_base = OTHER; note = sugar modification: lna; note = thymine; note = backbone modification: 5'-phosphorothioate
  modified_base 4: mod_base = OTHER; note = sugar modification: lna; note = backbone modification: 5'-phosphorothioate
  modified_base 5: mod_base = OTHER; note = backbone modification: 5'-phosphorothioate; note = sugar modification: lna; note = thymine
  modified_base 6: mod_base = OTHER; note = sugar modification: 2'-O-methoxyethylribose; note = backbone modification: 5'-phosphorothioate
  modified_base 7: mod_base = OTHER; mod_base = m5c; note = sugar modification: 2'-O-methoxyethylribose; note = backbone modification: 5'-phosphorothioate
  modified_base 8: mod_base = OTHER; note = thymine; note = sugar modification: lna; note = backbone modification: 5'-phosphorothioate
  modified_base 9: mod_base = OTHER; note = sugar modification: 2'-O-methoxyethylribose; note = thymine; note = backbone modification: 5'-phosphorothioate
  modified_base 10: mod_base = m5c; mod_base = OTHER; note = backbone modification: 5'-phosphorothioate; note = sugar modification: 2'-O-methoxyethylribose
  modified_base 11: mod_base = OTHER; note = backbone modification: 5'-phosphorothioate; note = sugar modification: 2'-O-methoxyethylribose
  modified_base 12: mod_base = OTHER; note = backbone modification: 5'-phosphorothioate; note = sugar modification: 2'-O-methoxyethylribose; note = thymine
  modified_base 13: mod_base = OTHER; mod_base = m5c; note = backbone modification: 5'-phosphorothioate; note = sugar modification: 2'-O-methoxyethylribose
  modified_base 14: mod_base = OTHER; mod_base = m5c; note = backbone modification: 5'-phosphorothioate; note = sugar modification: 2'-O-methoxyethylribose
  modified_base 15: mod_base = m5c; mod_base = OTHER; note = sugar modification: 2'-O-methoxyethylribose
cttgtacttcatccc

SEQ ID NO: 756 - RNA, 15 nt, synthetic construct
  source 1..15: mol_type = other RNA; note = Antisense oligonucleotide
  modified_base 1: mod_base = m5c; mod_base = OTHER; note = sugar modification: lna; note = backbone modification: 5'-phosphorothioate
  modified_base 2: mod_base = OTHER; note = backbone modification: 5'-phosphorothioate; note = sugar modification: 2'-O-methoxyethylribose; note = thymine
  modified_base 3: mod_base = OTHER; note = thymine; note = sugar modification: 2'-O-methoxyethylribose; note = backbone modification: 5'-phosphorothioate
  modified_base 4: mod_base = OTHER; note = sugar modification: lna; note = backbone modification: 5'-phosphorothioate
  modified_base 5: mod_base = OTHER; note = sugar modification: lna; note = backbone modification: 5'-phosphorothioate; note = thymine
  modified_base 6: mod_base = OTHER; note = backbone modification: 5'-phosphorothioate; note = sugar modification: lna
  modified_base 7: mod_base = OTHER; mod_base = m5c; note = sugar modification: lna; note = backbone modification: 5'-phosphorothioate
  modified_base 8: mod_base = OTHER; note = thymine; note = sugar modification: lna; note = backbone modification: 5'-phosphorothioate
  modified_base 9: mod_base = OTHER; note = backbone modification: 5'-phosphorothioate; note = thymine; note = sugar modification: 2'-O-methoxyethylribose
  modified_base 10: mod_base = OTHER; mod_base = m5c; note = backbone modification: 5'-phosphorothioate; note = sugar modification: 2'-O-methoxyethylribose
  modified_base 11: mod_base = OTHER; note = sugar modification: 2'-O-methoxyethylribose; note = backbone modification: 5'-phosphorothioate
  modified_base 12: mod_base = OTHER; note = backbone modification: 5'-phosphorothioate; note = sugar modification: 2'-O-methoxyethylribose; note = thymine
  modified_base 13: mod_base = m5c; mod_base = OTHER; note = backbone modification: 5'-phosphorothioate; note = sugar modification: 2'-O-methoxyethylribose
  modified_base 14: mod_base = OTHER; mod_base = m5c; note = backbone modification: 5'-phosphorothioate; note = sugar modification: 2'-O-methoxyethylribose
  modified_base 15: mod_base = m5c; mod_base = OTHER; note = sugar modification: 2'-O-methoxyethylribose
cttgtacttcatccc

SEQ ID NO: 757 - RNA, 15 nt, synthetic construct
  source 1..15: mol_type = other RNA; note = Antisense oligonucleotide
  modified_base 1: mod_base = OTHER; mod_base = m5c; note = sugar modification: lna; note = backbone modification: 5'-phosphorothioate
  modified_base 2: mod_base = OTHER; note = sugar modification: 2'-O-methoxyethylribose; note = thymine; note = backbone modification: 5'-phosphorothioate
  modified_base 3: mod_base = OTHER; note = backbone modification: 5'-phosphorothioate; note = sugar modification: lna; note = thymine
  modified_base 4: mod_base = OTHER; note = backbone modification: 5'-phosphorothioate; note = sugar modification: lna
  modified_base 5: mod_base = OTHER; note = sugar modification: lna; note = backbone modification: 5'-phosphorothioate; note = thymine
  modified_base 6: mod_base = OTHER; note = backbone modification: 5'-phosphorothioate; note = sugar modification: lna
  modified_base 7: mod_base = m5c; mod_base = OTHER; note = backbone modification: 5'-phosphorothioate; note = sugar modification: lna
  modified_base 8: mod_base = OTHER; note = sugar modification: 2'-O-methoxyethylribose; note = backbone modification: 5'-phosphorothioate; note = thymine
  modified_base 9: mod_base = OTHER; note = thymine; note = sugar modification: 2'-O-methoxyethylribose; note = backbone modification: 5'-phosphorothioate
  modified_base 10: mod_base = OTHER; mod_base = m5c; note = sugar modification: 2'-O-methoxyethylribose; note = backbone modification: 5'-phosphorothioate
  modified_base 11: mod_base = OTHER; note = sugar modification: 2'-O-methoxyethylribose; note = backbone modification: 5'-phosphorothioate
  modified_base 12: mod_base = OTHER; note = backbone modification: 5'-phosphorothioate; note = sugar modification: 2'-O-methoxyethylribose; note = thymine
  modified_base 13: mod_base = m5c; mod_base = OTHER; note = sugar modification: 2'-O-methoxyethylribose; note = backbone modification: 5'-phosphorothioate
  modified_base 14: mod_base = OTHER; mod_base = m5c; note = sugar modification: 2'-O-methoxyethylribose; note = backbone modification: 5'-phosphorothioate
  modified_base 15: mod_base = m5c; mod_base = OTHER; note = sugar modification: 2'-O-methoxyethylribose
cttgtacttcatccc

SEQ ID NO: 758 - RNA, 15 nt, synthetic construct
  source 1..15: mol_type = other RNA; note = Antisense oligonucleotide
  modified_base 1: mod_base = OTHER; mod_base = m5c; note = backbone modification: 5'-phosphorothioate; note = sugar modification: 2'-O-methoxyethylribose
  modified_base 2: mod_base = OTHER; note = thymine; note = backbone modification: 5'-phosphorothioate; note = sugar modification: lna
  modified_base 3: mod_base = OTHER; note = backbone modification: 5'-phosphorothioate; note = thymine; note = sugar modification: lna
  modified_base 4: mod_base = OTHER; note = backbone modification: 5'-phosphorothioate; note = sugar modification: lna
  modified_base 5: mod_base = OTHER; note = thymine; note = backbone modification: 5'-phosphorothioate; note = sugar modification: lna
  modified_base 6: mod_base = OTHER; note = sugar modification: lna; note = backbone modification: 5'-phosphorothioate
  modified_base 7: mod_base = OTHER; mod_base = m5c; note = sugar modification: lna; note = backbone modification: 5'-phosphorothioate
  modified_base 8: mod_base = OTHER; note = sugar modification: lna; note = backbone modification: 5'-phosphorothioate; note = thymine
  modified_base 9: mod_base = OTHER; note = thymine; note = backbone modification: 5'-phosphorothioate; note = sugar modification: 2'-O-methoxyethylribose
  modified_base 10: mod_base = OTHER; mod_base = m5c; note = backbone modification: 5'-phosphorothioate; note = sugar modification: 2'-O-methoxyethylribose
  modified_base 11: mod_base = OTHER; note = backbone modification: 5'-phosphorothioate; note = sugar modification: 2'-O-methoxyethylribose
  modified_base 12: mod_base = OTHER; note = thymine; note = sugar modification: 2'-O-methoxyethylribose; note = backbone modification: 5'-phosphorothioate
  modified_base 13: mod_base = OTHER; mod_base = m5c; note = sugar modification: 2'-O-methoxyethylribose; note = backbone modification: 5'-phosphorothioate
  modified_base 14: mod_base = m5c; mod_base = OTHER; note = backbone modification: 5'-phosphorothioate; note = sugar modification: 2'-O-methoxyethylribose
  modified_base 15: mod_base = OTHER; mod_base = m5c; note = sugar modification: 2'-O-methoxyethylribose
cttgtacttcatccc

SEQ ID NO: 759 - RNA, 15 nt, synthetic construct
  source 1..15: mol_type = other RNA; note = Antisense oligonucleotide
  modified_base 1: mod_base = OTHER; note = backbone modification: 5'-phosphorothioate; note = sugar modification: lna
  modified_base 2: mod_base = OTHER; note = thymine; note = sugar modification: 2'-O-methoxyethylribose; note = backbone modification: 5'-phosphorothioate
  modified_base 3: mod_base = OTHER; note = thymine; note = sugar modification: 2'-O-methoxyethylribose; note = backbone modification: 5'-phosphorothioate
  modified_base 4: mod_base = OTHER; mod_base = m5c; note = backbone modification: 5'-phosphorothioate; note = sugar modification: 2'-O-methoxyethylribose
  modified_base 5: mod_base = OTHER; note = backbone modification: 5'-phosphorothioate; note = sugar modification: 2'-O-methoxyethylribose; note = thymine
  modified_base 6: mod_base = OTHER; note = backbone modification: 5'-phosphorothioate; note = sugar modification: 2'-O-methoxyethylribose; note = thymine
  modified_base 7: mod_base = OTHER; note = backbone modification: 5'-phosphorothioate; note = sugar modification: 2'-O-methoxyethylribose
  modified_base 8: mod_base = OTHER; note = backbone modification: 5'-phosphorothioate; note = sugar modification: 2'-O-methoxyethylribose; note = thymine
  modified_base 9: mod_base = OTHER; note = sugar modification: 2'-O-methoxyethylribose; note = backbone modification: 5'-phosphorothioate
  modified_base 10: mod_base = m5c; mod_base = OTHER; note = backbone modification: 5'-phosphorothioate; note = sugar modification: 2'-O-methoxyethylribose
  modified_base 11: mod_base = OTHER; note = thymine; note = sugar modification: 2'-O-methoxyethylribose; note = backbone modification: 5'-phosphorothioate
  modified_base 12: mod_base = OTHER; note = thymine; note = sugar modification: 2'-O-methoxyethylribose; note = backbone modification: 5'-phosphorothioate
  modified_base 13: mod_base = OTHER; mod_base = m5c; note = backbone modification: 5'-phosphorothioate; note = sugar modification: 2'-O-methoxyethylribose
  modified_base 14: mod_base = OTHER; note = sugar modification: 2'-O-methoxyethylribose; note = backbone modification: 5'-phosphorothioate
  modified_base 15: mod_base = OTHER; note = thymine; note = sugar modification: lna
gttcttgtacttcat

SEQ ID NO: 760 - RNA, 15 nt, synthetic construct
  source 1..15: mol_type = other RNA; note = Antisense oligonucleotide
  modified_base 1: mod_base = OTHER; note = backbone modification: 5'-phosphorothioate; note = sugar modification: lna
  modified_base 2: mod_base = OTHER; note = sugar modification: lna; note = thymine; note = backbone modification: 5'-phosphorothioate
  modified_base 3: mod_base = OTHER; note = thymine; note = sugar modification: 2'-O-methoxyethylribose; note = backbone modification: 5'-phosphorothioate
  modified_base 4: mod_base = OTHER; mod_base = m5c; note = sugar modification: 2'-O-methoxyethylribose; note = backbone modification: 5'-phosphorothioate
  modified_base 5: mod_base = OTHER; note = sugar modification: 2'-O-methoxyethylribose; note = backbone modification: 5'-phosphorothioate; note = thymine
  modified_base 6: mod_base = OTHER; note = sugar modification: 2'-O-methoxyethylribose; note = thymine; note = backbone modification: 5'-phosphorothioate
  modified_base 7: mod_base = OTHER; note = backbone modification: 5'-phosphorothioate; note = sugar modification: 2'-O-methoxyethylribose
  modified_base 8: mod_base = OTHER; note = sugar modification: 2'-O-methoxyethylribose; note = backbone modification: 5'-phosphorothioate; note = thymine
  modified_base 9: mod_base = OTHER; note = sugar modification: 2'-O-methoxyethylribose; note = backbone modification: 5'-phosphorothioate
  modified_base 10: mod_base = OTHER; mod_base = m5c; note = sugar modification: 2'-O-methoxyethylribose; note = backbone modification: 5'-phosphorothioate
  modified_base 11: mod_base = OTHER; note = sugar modification: 2'-O-methoxyethylribose; note = thymine; note = backbone modification: 5'-phosphorothioate
  modified_base 12: mod_base = OTHER; note = sugar modification: 2'-O-methoxyethylribose; note = backbone modification: 5'-phosphorothioate; note = thymine
  modified_base 13: mod_base = OTHER; mod_base = m5c; note = backbone modification: 5'-phosphorothioate; note = sugar modification: 2'-O-methoxyethylribose
  modified_base 14: mod_base = OTHER; note = sugar modification: lna; note = backbone modification: 5'-phosphorothioate
  modified_base 15: mod_base = OTHER; note = sugar modification: lna; note = thymine
gttcttgtacttcat

SEQ ID NO: 761 - RNA, 15 nt, synthetic construct
  source 1..15: mol_type = other RNA; note = Antisense oligonucleotide
  modified_base 1: mod_base = OTHER; note = backbone modification: 5'-phosphorothioate; note = sugar modification: lna
  modified_base 2: mod_base = OTHER; note = backbone modification: 5'-phosphorothioate; note = sugar modification: lna; note = thymine
  modified_base 3: mod_base = OTHER; note = thymine; note = sugar modification: 2'-O-methoxyethylribose; note = backbone modification: 5'-phosphorothioate
  modified_base 4: mod_base = m5c; mod_base = OTHER; note = sugar modification: 2'-O-methoxyethylribose; note = backbone modification: 5'-phosphorothioate
  modified_base 5: mod_base = OTHER; note = backbone modification: 5'-phosphorothioate; note = sugar modification: 2'-O-methoxyethylribose; note = thymine
  modified_base 6: mod_base = OTHER; note = backbone modification: 5'-phosphorothioate; note = thymine; note = sugar modification: 2'-O-methoxyethylribose
  modified_base 7: mod_base = OTHER; note = sugar modification: 2'-O-methoxyethylribose; note = backbone modification: 5'-phosphorothioate
  modified_base 8: mod_base = OTHER; note = thymine; note = sugar modification: 2'-O-methoxyethylribose; note = backbone modification: 5'-phosphorothioate
  modified_base 9: mod_base = OTHER; note = backbone modification: 5'-phosphorothioate; note = sugar modification: 2'-O-methoxyethylribose
  modified_base 10: mod_base = m5c; mod_base = OTHER; note = sugar modification: 2'-O-methoxyethylribose; note = backbone modification: 5'-phosphorothioate
  modified_base 11: mod_base = OTHER; note = thymine; note = backbone modification: 5'-phosphorothioate; note = sugar modification: 2'-O-methoxyethylribose
  modified_base 12: mod_base = OTHER; note = thymine; note = backbone modification: 5'-phosphorothioate; note = sugar modification: 2'-O-methoxyethylribose
  modified_base 13: mod_base = m5c; mod_base = OTHER; note = sugar modification: 2'-O-methoxyethylribose; note = backbone modification: 5'-phosphorothioate
  modified_base 14: mod_base = OTHER; note = backbone modification: 5'-phosphorothioate; note = sugar modification: 2'-O-methoxyethylribose
  modified_base 15: mod_base = OTHER; note = thymine; note = sugar modification: lna
gttcttgtacttcat

SEQ ID NO: 762 - RNA, 15 nt, synthetic construct
  source 1..15: mol_type = other RNA; note = Antisense oligonucleotide
  modified_base 1: mod_base = OTHER; note = backbone modification: 5'-phosphorothioate; note = sugar modification: lna
  modified_base 2: mod_base = OTHER; note = thymine; note = sugar modification: 2'-O-methoxyethylribose; note = backbone modification: 5'-phosphorothioate
  modified_base 3: mod_base = OTHER; note = thymine; note = sugar modification: 2'-O-methoxyethylribose; note = backbone modification: 5'-phosphorothioate
  modified_base 4: mod_base = OTHER; mod_base = m5c; note = sugar modification: 2'-O-methoxyethylribose; note = backbone modification: 5'-phosphorothioate
  modified_base 5: mod_base = OTHER; note = sugar modification: 2'-O-methoxyethylribose; note = backbone modification: 5'-phosphorothioate; note = thymine
  modified_base 6: mod_base = OTHER; note = backbone modification: 5'-phosphorothioate; note = sugar modification: 2'-O-methoxyethylribose; note = thymine
  modified_base 7: mod_base = OTHER; note = sugar modification: 2'-O-methoxyethylribose; note = backbone modification: 5'-phosphorothioate
  modified_base 8: mod_base = OTHER; note = sugar modification: 2'-O-methoxyethylribose; note = backbone modification: 5'-phosphorothioate; note = thymine
  modified_base 9: mod_base = OTHER; note = sugar modification: 2'-O-methoxyethylribose; note = backbone modification: 5'-phosphorothioate
  modified_base 10: mod_base = OTHER; mod_base = m5c; note = sugar modification: 2'-O-methoxyethylribose; note = backbone modification: 5'-phosphorothioate
  modified_base 11: mod_base = OTHER; note = sugar modification: 2'-O-methoxyethylribose; note = thymine; note = backbone modification: 5'-phosphorothioate
  modified_base 12: mod_base = OTHER; note = thymine; note = backbone modification: 5'-phosphorothioate; note = sugar modification: 2'-O-methoxyethylribose
  modified_base 13: mod_base = m5c; mod_base = OTHER; note = sugar modification: 2'-O-methoxyethylribose; note = backbone modification: 5'-phosphorothioate
  modified_base 14: mod_base = OTHER; note = backbone modification: 5'-phosphorothioate; note = sugar modification: lna
  modified_base 15: mod_base = OTHER; note = thymine; note = sugar modification: lna
gttcttgtacttcat

SEQ ID NO: 763 - RNA, 15 nt, synthetic construct
  source 1..15: mol_type = other RNA; note = Antisense oligonucleotide
  modified_base 1: mod_base = OTHER; note = backbone modification: 5'-phosphorothioate; note = sugar modification: lna
  modified_base 2: mod_base = OTHER; note = thymine; note = sugar modification: lna; note = backbone modification: 5'-phosphorothioate
  modified_base 3: mod_base = OTHER; note = backbone modification: 5'-phosphorothioate; note = thymine; note = sugar modification: lna
  modified_base 4: mod_base = m5c; mod_base = OTHER; note = backbone modification: 5'-phosphorothioate; note = sugar modification: 2'-O-methoxyethylribose
  modified_base 5: mod_base = OTHER; note = thymine; note = backbone modification: 5'-phosphorothioate; note = sugar modification: 2'-O-methoxyethylribose
  modified_base 6: mod_base = OTHER; note = sugar modification: 2'-O-methoxyethylribose; note = thymine; note = backbone modification: 5'-phosphorothioate
  modified_base 7: mod_base = OTHER; note = sugar modification: 2'-O-methoxyethylribose; note = backbone modification: 5'-phosphorothioate
  modified_base 8: mod_base = OTHER; note = thymine; note = sugar modification: 2'-O-methoxyethylribose; note = backbone modification: 5'-phosphorothioate
  modified_base 9: mod_base = OTHER; note = backbone modification: 5'-phosphorothioate; note = sugar modification: 2'-O-methoxyethylribose
  modified_base 10: mod_base = m5c; mod_base = OTHER; note = backbone modification: 5'-phosphorothioate; note = sugar modification: 2'-O-methoxyethylribose
  modified_base 11: mod_base = OTHER; note = backbone modification: 5'-phosphorothioate; note = thymine; note = sugar modification: 2'-O-methoxyethylribose
  modified_base 12: mod_base = OTHER; note = backbone modification: 5'-phosphorothioate; note = thymine; note = sugar modification: 2'-O-methoxyethylribose
  modified_base 13: mod_base = m5c; mod_base = OTHER; note = sugar modification: 2'-O-methoxyethylribose; note = backbone modification: 5'-phosphorothioate
  modified_base 14: mod_base = OTHER; note = sugar modification: 2'-O-methoxyethylribose; note = backbone modification: 5'-phosphorothioate
  modified_base 15: mod_base = OTHER; note = sugar modification: lna; note = thymine
gttcttgtacttcat

SEQ ID NO: 764 - RNA, 15 nt, synthetic construct
  source 1..15: mol_type = other RNA; note = Antisense oligonucleotide
  modified_base 1: mod_base = OTHER; note = backbone modification: 5'-phosphorothioate; note = sugar modification: lna
  modified_base 2: mod_base = OTHER; note = backbone modification: 5'-phosphorothioate; note = thymine; note = sugar modification: 2'-O-methoxyethylribose
  modified_base 3: mod_base = OTHER; note = sugar modification: 2'-O-methoxyethylribose; note = backbone modification: 5'-phosphorothioate; note = thymine
  modified_base 4: mod_base = m5c; mod_base = OTHER; note = sugar modification: 2'-O-methoxyethylribose; note = backbone modification: 5'-phosphorothioate
  modified_base 5: mod_base = OTHER; note = backbone modification: 5'-phosphorothioate; note = thymine; note = sugar modification: 2'-O-methoxyethylribose
  modified_base 6: mod_base = OTHER; note = sugar modification: 2'-O-methoxyethylribose; note = backbone modification: 5'-phosphorothioate; note = thymine
  modified_base 7: mod_base = OTHER; note = backbone modification: 5'-phosphorothioate; note = sugar modification: 2'-O-methoxyethylribose
  modified_base 8: mod_base = OTHER; note = sugar modification: 2'-O-methoxyethylribose; note = thymine; note = backbone modification: 5'-phosphorothioate
  modified_base 9: mod_base = OTHER; note = backbone modification: 5'-phosphorothioate; note = sugar modification: 2'-O-methoxyethylribose
  modified_base 10: mod_base = OTHER; mod_base = m5c; note = sugar modification: 2'-O-methoxyethylribose; note = backbone modification: 5'-phosphorothioate
  modified_base 11: mod_base = OTHER; note = sugar modification: 2'-O-methoxyethylribose; note = thymine; note = backbone modification: 5'-phosphorothioate
  modified_base 12: mod_base = OTHER; note = sugar modification: 2'-O-methoxyethylribose; note = backbone modification: 5'-phosphorothioate; note = thymine
  modified_base 13: mod_base = OTHER; mod_base = m5c; note = sugar modification: lna; note = backbone modification: 5'-phosphorothioate
  modified_base 14: mod_base = OTHER; note = backbone modification: 5'-phosphorothioate; note = sugar modification: lna
  modified_base 15: mod_base = OTHER; note = thymine; note = sugar modification: lna
gttcttgtacttcat

SEQ ID NO: 765 - RNA, 15 nt, synthetic construct
  source 1..15: mol_type = other RNA; note = Antisense oligonucleotide
  modified_base 1: mod_base = OTHER; note = backbone modification: 5'-phosphorothioate; note = sugar modification: lna
  modified_base 2: mod_base = OTHER; note = thymine; note = sugar modification: lna; note = backbone modification: 5'-phosphorothioate
  modified_base 3: mod_base = OTHER; note = backbone modification: 5'-phosphorothioate; note = thymine; note = sugar modification: 2'-O-methoxyethylribose
  modified_base 4: mod_base = OTHER; mod_base = m5c; note = sugar modification: 2'-O-methoxyethylribose; note = backbone modification: 5'-phosphorothioate
  modified_base 5: mod_base = OTHER; note = thymine; note = sugar modification: 2'-O-methoxyethylribose; note = backbone modification: 5'-phosphorothioate
  modified_base 6: mod_base = OTHER; note = thymine; note = backbone modification: 5'-phosphorothioate; note = sugar modification: 2'-O-methoxyethylribose
  modified_base 7: mod_base = OTHER; note = sugar modification: 2'-O-methoxyethylribose; note = backbone modification: 5'-phosphorothioate
  modified_base 8: mod_base = OTHER; note = sugar modification: 2'-O-methoxyethylribose; note = thymine; note = backbone modification: 5'-phosphorothioate
  modified_base 9: mod_base = OTHER; note = sugar modification: 2'-O-methoxyethylribose; note = backbone modification: 5'-phosphorothioate
  modified_base 10: mod_base = m5c; mod_base = OTHER; note = sugar modification: 2'-O-methoxyethylribose; note = backbone modification: 5'-phosphorothioate
  modified_base 11: mod_base = OTHER; note = sugar modification: 2'-O-methoxyethylribose; note = thymine; note = backbone modification: 5'-phosphorothioate
  modified_base 12: mod_base = OTHER; note = sugar modification: 2'-O-methoxyethylribose; note = thymine; note = backbone modification: 5'-phosphorothioate
  modified_base 13: mod_base = OTHER; mod_base = m5c; note = sugar modification: lna; note = backbone modification: 5'-phosphorothioate
  modified_base 14: mod_base = OTHER; note = backbone modification: 5'-phosphorothioate; note = sugar modification: lna
  modified_base 15: mod_base = OTHER; note = thymine; note = sugar modification: lna
gttcttgtacttcat

SEQ ID NO: 766 - RNA, 15 nt, synthetic construct
  source 1..15: mol_type = other RNA; note = Antisense oligonucleotide
  modified_base 1: mod_base = OTHER; note = sugar modification: lna; note = backbone modification: 5'-phosphorothioate
  modified_base 2: mod_base = OTHER; note = thymine; note = sugar modification: lna; note = backbone modification: 5'-phosphorothioate
  modified_base 3: mod_base = OTHER; note = sugar modification: lna; note = backbone modification: 5'-phosphorothioate; note = thymine
  modified_base 4: mod_base = m5c; mod_base = OTHER; note = sugar modification: 2'-O-methoxyethylribose; note = backbone modification: 5'-phosphorothioate
  modified_base 5: mod_base = OTHER; note = thymine; note = sugar modification: 2'-O-methoxyethylribose; note = backbone modification: 5'-phosphorothioate
  modified_base 6: mod_base = OTHER; note = sugar modification: 2'-O-methoxyethylribose; note = backbone modification: 5'-phosphorothioate; note = thymine
  modified_base 7: mod_base = OTHER; note = sugar modification: 2'-O-methoxyethylribose; note = backbone modification: 5'-phosphorothioate
  modified_base 8: mod_base = OTHER; note = sugar modification: 2'-O-methoxyethylribose; note = thymine; note = backbone modification: 5'-phosphorothioate
  modified_base 9: mod_base = OTHER; note = sugar modification: 2'-O-methoxyethylribose; note = backbone modification: 5'-phosphorothioate
  modified_base 10: mod_base = m5c; mod_base = OTHER; note = backbone modification: 5'-phosphorothioate; note = sugar modification: 2'-O-methoxyethylribose
  modified_base 11: mod_base = OTHER; note = thymine; note = sugar modification: 2'-O-methoxyethylribose; note = backbone modification: 5'-phosphorothioate
  modified_base 12: mod_base = OTHER; note = backbone modification: 5'-phosphorothioate; note = sugar modification: 2'-O-methoxyethylribose; note = thymine
  modified_base 13: mod_base = m5c; mod_base = OTHER; note = backbone modification: 5'-phosphorothioate; note = sugar modification: 2'-O-methoxyethylribose
  modified_base 14: mod_base = OTHER; note = sugar modification: lna; note = backbone modification: 5'-phosphorothioate
  modified_base 15: mod_base = OTHER; note = sugar modification: lna; note = thymine
gttcttgtacttcat

SEQ ID NO: 767 - RNA, 15 nt, synthetic construct
  source 1..15: mol_type = other RNA; note = Antisense oligonucleotide
  modified_base 1: mod_base = OTHER; note = backbone modification: 5'-phosphorothioate; note = sugar modification: lna
  modified_base 2: mod_base = OTHER; note = sugar modification: 2'-O-methoxyethylribose; note = backbone modification: 5'-phosphorothioate; note = thymine
  modified_base 3: mod_base = OTHER; note = thymine; note = sugar modification: 2'-O-methoxyethylribose; note = backbone modification: 5'-phosphorothioate
  modified_base 4: mod_base = OTHER; mod_base = m5c; note = backbone modification: 5'-phosphorothioate; note = sugar modification: 2'-O-methoxyethylribose
  modified_base 5: mod_base = OTHER; note = backbone modification: 5'-phosphorothioate; note = thymine; note = sugar modification: 2'-O-methoxyethylribose
  modified_base 6: mod_base = OTHER; note = sugar modification: 2'-O-methoxyethylribose; note = backbone modification: 5'-phosphorothioate; note = thymine
  modified_base 7: mod_base = OTHER; note = sugar modification: 2'-O-methoxyethylribose; note = backbone modification: 5'-phosphorothioate
  modified_base 8: mod_base = OTHER; note = thymine; note = backbone modification: 5'-phosphorothioate; note = sugar modification: lna
  modified_base 9: mod_base = OTHER; note = sugar modification: lna; note = backbone modification: 5'-phosphorothioate
  modified_base 10: mod_base = OTHER; mod_base = m5c; note = backbone modification: 5'-phosphorothioate; note = sugar modification: 2'-O-methoxyethylribose
  modified_base 11: mod_base = OTHER; note = backbone modification: 5'-phosphorothioate; note = thymine; note = sugar modification: 2'-O-methoxyethylribose
  modified_base 12: mod_base = OTHER; note = thymine; note = backbone modification: 5'-phosphorothioate; note = sugar modification: 2'-O-methoxyethylribose
  modified_base 13: mod_base = m5c; mod_base = OTHER; note = backbone modification: 5'-phosphorothioate; note = sugar modification: 2'-O-methoxyethylribose
  modified_base 14: mod_base = OTHER; note = sugar modification: 2'-O-methoxyethylribose; note = backbone modification: 5'-phosphorothioate
  modified_base 15: mod_base = OTHER; note = thymine; note = sugar modification: lna
gttcttgtacttcat

SEQ ID NO: 768 - RNA, 15 nt, synthetic construct
  source 1..15: mol_type = other RNA; note = Antisense oligonucleotide
  modified_base 1: mod_base = OTHER; note = sugar modification: 2'-O-methoxyethylribose; note = backbone modification: 5'-phosphorothioate
  modified_base 2: mod_base = OTHER; note = backbone modification: 5'-phosphorothioate; note = thymine; note = sugar modification: lna
  modified_base 3: mod_base = OTHER; note = thymine; note = sugar modification: 2'-O-methoxyethylribose; note = backbone modification: 5'-phosphorothioate
  modified_base 4: mod_base = m5c; mod_base = OTHER; note = sugar modification: lna; note = backbone modification: 5'-phosphorothioate
  modified_base 5: mod_base = OTHER; note = sugar modification: 2'-O-methoxyethylribose; note = thymine; note = backbone modification: 5'-phosphorothioate
  modified_base 6: mod_base = OTHER; note = backbone modification: 5'-phosphorothioate; note = thymine; note = sugar modification: 2'-O-methoxyethylribose
  modified_base 7: mod_base = OTHER; note = backbone modification: 5'-phosphorothioate; note = sugar modification: 2'-O-methoxyethylribose
  modified_base 8: mod_base = OTHER; note = sugar modification: 2'-O-methoxyethylribose; note = backbone modification: 5'-phosphorothioate; note = thymine
  modified_base 9: mod_base = OTHER; note = backbone modification: 5'-phosphorothioate; note = sugar modification: lna
  modified_base 10: mod_base = OTHER; mod_base = m5c; note = sugar modification: 2'-O-methoxyethylribose; note = backbone modification: 5'-phosphorothioate
  modified_base 11: mod_base = OTHER; note = sugar modification: 2'-O-methoxyethylribose; note = thymine; note = backbone modification: 5'-phosphorothioate
  modified_base 12: mod_base = OTHER; note = backbone modification: 5'-phosphorothioate; note = sugar modification: 2'-O-methoxyethylribose; note = thymine
  modified_base 13: mod_base = m5c; mod_base = OTHER; note = sugar modification: 2'-O-methoxyethylribose; note = backbone modification: 5'-phosphorothioate
  modified_base 14: mod_base = OTHER; note = sugar modification: 2'-O-methoxyethylribose; note = backbone modification: 5'-phosphorothioate
  modified_base 15: mod_base = OTHER; note = sugar modification: lna; note = thymine
gttcttgtacttcat

SEQ ID NO: 769 - RNA, 15 nt, synthetic construct
  source 1..15: mol_type = other RNA; note = Antisense oligonucleotide
  modified_base 1: mod_base = OTHER; note = backbone modification: 5'-phosphorothioate; note = sugar modification: 2'-O-methoxyethylribose
  modified_base 2: mod_base = OTHER; note = sugar modification: lna; note = thymine; note = backbone modification: 5'-phosphorothioate
  modified_base 3: mod_base = OTHER; note = sugar modification: 2'-O-methoxyethylribose; note = thymine; note = backbone modification: 5'-phosphorothioate
  modified_base 4: mod_base = m5c; mod_base = OTHER; note = sugar modification: 2'-O-methoxyethylribose; note = backbone modification: 5'-phosphorothioate
  modified_base 5: mod_base = OTHER; note = sugar modification: lna; note = thymine; note = backbone modification: 5'-phosphorothioate
  modified_base 6: mod_base = OTHER; note = backbone modification: 5'-phosphorothioate; note = sugar modification: lna; note = thymine
  modified_base 7: mod_base = OTHER; note = sugar modification: 2'-O-methoxyethylribose; note = backbone modification: 5'-phosphorothioate
  modified_base 8: mod_base = OTHER; note = sugar modification: 2'-O-methoxyethylribose; note = backbone modification: 5'-phosphorothioate; note = thymine
  modified_base 9: mod_base = OTHER; note = backbone modification: 5'-phosphorothioate; note = sugar modification: 2'-O-methoxyethylribose
  modified_base 10: mod_base = OTHER; mod_base = m5c; note = backbone modification: 5'-phosphorothioate; note = sugar modification: 2'-O-methoxyethylribose
  modified_base 11: mod_base = OTHER; note = thymine; note = sugar modification: lna; note = backbone modification: 5'-phosphorothioate
  modified_base 12: mod_base = OTHER; note = sugar modification: 2'-O-methoxyethylribose; note = backbone modification: 5'-phosphorothioate; note = thymine
  modified_base 13: mod_base = OTHER; mod_base = m5c; note = backbone modification: 5'-phosphorothioate; note = sugar modification: 2'-O-methoxyethylribose
  modified_base 14: mod_base = OTHER; note = backbone modification: 5'-phosphorothioate; note = sugar modification: 2'-O-methoxyethylribose
  modified_base 15: mod_base = OTHER; note = thymine; note = sugar modification: 2'-O-methoxyethylribose
gttcttgtacttcat

SEQ ID NO: 770 - RNA, 15 nt, synthetic construct
  source 1..15: mol_type = other RNA; note = Antisense oligonucleotide
  modified_base 1: mod_base = OTHER; note = backbone modification: 5'-phosphorothioate; note = sugar modification: 2'-O-methoxyethylribose
  modified_base 2: mod_base = OTHER; note = backbone modification: 5'-phosphorothioate; note = thymine; note = sugar modification: lna
  modified_base 3: mod_base = OTHER; note = sugar modification: 2'-O-methoxyethylribose; note = thymine; note = backbone modification: 5'-phosphorothioate
  modified_base 4: mod_base = OTHER; mod_base = m5c; note = backbone modification: 5'-phosphorothioate; note = sugar modification: 2'-O-methoxyethylribose
  modified_base 5: mod_base = OTHER; note = backbone modification: 5'-phosphorothioate; note = sugar modification: 2'-O-methoxyethylribose; note = thymine
  modified_base 6: mod_base = OTHER; note = thymine; note = sugar modification: lna; note = backbone modification: 5'-phosphorothioate
  modified_base 7: mod_base = OTHER; note = backbone modification: 5'-phosphorothioate; note = sugar modification: 2'-O-methoxyethylribose
  modified_base 8: mod_base = OTHER; note = backbone modification: 5'-phosphorothioate; note = sugar modification: 2'-O-methoxyethylribose; note = thymine
  modified_base 9: mod_base = OTHER; note = backbone modification: 5'-phosphorothioate; note = sugar modification: 2'-O-methoxyethylribose
  modified_base 10: mod_base = m5c; mod_base = OTHER; note = backbone modification: 5'-phosphorothioate; note = sugar modification: 2'-O-methoxyethylribose
  modified_base 11: mod_base = OTHER; note = thymine; note = sugar modification: 2'-O-methoxyethylribose; note = backbone modification: 5'-phosphorothioate
  modified_base 12: mod_base = OTHER; note = thymine; note = sugar modification: 2'-O-methoxyethylribose; note = backbone modification: 5'-phosphorothioate
  modified_base 13: mod_base = OTHER; mod_base = m5c; note = sugar modification: 2'-O-methoxyethylribose; note = backbone modification: 5'-phosphorothioate
  modified_base 14: mod_base = OTHER; note = backbone modification: 5'-phosphorothioate; note = sugar modification: lna
  modified_base 15: mod_base = OTHER; note = thymine; note = sugar modification: lna
gttcttgtacttcat

SEQ ID NO: 771 - RNA, 15 nt, synthetic construct
  source 1..15: mol_type = other RNA; note = Antisense oligonucleotide
  modified_base 1: mod_base = OTHER; note = backbone modification: 5'-phosphorothioate; note = sugar modification: 2'-O-methoxyethylribose
  modified_base 2: mod_base = OTHER; note = backbone modification: 5'-phosphorothioate; note = sugar modification: 2'-O-methoxyethylribose; note = thymine
  modified_base 3: mod_base = OTHER; note = sugar modification: 2'-O-methoxyethylribose; note = backbone modification: 5'-phosphorothioate; note = thymine
  modified_base 4: mod_base = m5c; mod_base = OTHER; note = backbone modification: 5'-phosphorothioate; note = sugar modification: 2'-O-methoxyethylribose
  modified_base 5: mod_base = OTHER; note = sugar modification: 2'-O-methoxyethylribose; note = thymine; note = backbone modification: 5'-phosphorothioate
  modified_base 6: mod_base = OTHER; note = thymine; note = backbone modification: 5'-phosphorothioate; note = sugar modification: 2'-O-methoxyethylribose
  modified_base 7: mod_base = OTHER; note = sugar modification: 2'-O-methoxyethylribose; note = backbone modification: 5'-phosphorothioate
  modified_base 8: mod_base = OTHER; note = sugar modification: 2'-O-methoxyethylribose; note = backbone modification: 5'-phosphorothioate; note = thymine
  modified_base 9: mod_base = OTHER; note = sugar modification: lna; note = backbone modification: 5'-phosphorothioate
  modified_base 10: mod_base = OTHER; mod_base = m5c; note = backbone modification: 5'-phosphorothioate; note = sugar modification: 2'-O-methoxyethylribose
  modified_base 11: mod_base = OTHER; note = backbone modification: 5'-phosphorothioate; note = thymine; note = sugar modification: lna
  modified_base 12: mod_base = OTHER; note = thymine; note = sugar modification: lna; note = backbone modification: 5'-phosphorothioate
  modified_base 13: mod_base = m5c; mod_base = OTHER; note = sugar modification: 2'-O-methoxyethylribose; note = backbone modification: 5'-phosphorothioate
  modified_base 14: mod_base = OTHER; note = sugar modification: 2'-O-methoxyethylribose; note = backbone modification: 5'-phosphorothioate
  modified_base 15: mod_base = OTHER; note = thymine; note = sugar modification: lna
gttcttgtacttcat

SEQ ID NO: 772 - RNA, 15 nt, synthetic construct
  source 1..15: mol_type = other RNA; note = Antisense oligonucleotide
  modified_base 1: mod_base = OTHER; note = sugar modification: 2'-O-methoxyethylribose; note = backbone modification: 5'-phosphorothioate
  modified_base 2: mod_base = OTHER; note = thymine; note = sugar modification: 2'-O-methoxyethylribose; note = backbone modification: 5'-phosphorothioate
  modified_base 3: mod_base = OTHER; note = sugar modification: lna; note = backbone modification: 5'-phosphorothioate; note = thymine
  modified_base 4: mod_base = m5c; mod_base = OTHER; note = sugar modification: lna; note = backbone modification: 5'-phosphorothioate
  modified_base 5: mod_base = OTHER; note = sugar modification: lna; note = thymine; note = backbone modification: 5'-phosphorothioate
  modified_base 6: mod_base = OTHER; note = thymine; note = sugar modification: 2'-O-methoxyethylribose; note = backbone modification: 5'-phosphorothioate
  modified_base 7: mod_base = OTHER; note = sugar modification: 2'-O-methoxyethylribose; note = backbone modification: 5'-phosphorothioate
  modified_base 8: mod_base = OTHER; note = backbone modification: 5'-phosphorothioate; note = thymine; note = sugar modification: 2'-O-methoxyethylribose
  modified_base 9: mod_base = OTHER; note = backbone modification: 5'-phosphorothioate; note = sugar modification: 2'-O-methoxyethylribose
  modified_base 10: mod_base = OTHER; mod_base = m5c; note = sugar modification: 2'-O-methoxyethylribose; note = backbone modification: 5'-phosphorothioate
  modified_base 11: mod_base = OTHER; note = sugar modification: 2'-O-methoxyethylribose; note = thymine; note = backbone modification: 5'-phosphorothioate
  modified_base 12: mod_base = OTHER; note = backbone modification: 5'-phosphorothioate; note = thymine; note = sugar modification: 2'-O-methoxyethylribose
  modified_base 13: mod_base = OTHER; mod_base = m5c; note = backbone modification: 5'-phosphorothioate; note = sugar modification: lna
  modified_base 14: mod_base = OTHER; note = sugar modification: 2'-O-methoxyethylribose; note = backbone modification: 5'-phosphorothioate
  modified_base 15: mod_base = OTHER; note = sugar modification: lna; note = thymine
gttcttgtacttcat

SEQ ID NO: 773 - RNA, 15 nt, synthetic construct
  source 1..15: mol_type = other RNA; note = Antisense oligonucleotide
  modified_base 1: mod_base = OTHER; note = sugar modification: 2'-O-methoxyethylribose; note = backbone modification: 5'-phosphorothioate
  modified_base 2: mod_base = OTHER; note = thymine; note = backbone modification: 5'-phosphorothioate; note = sugar modification: lna
  modified_base 3: mod_base = OTHER; note = backbone modification: 5'-phosphorothioate; note = sugar modification: lna; note = thymine
  modified_base 4: mod_base = OTHER; mod_base = m5c; note = backbone modification: 5'-phosphorothioate; note = sugar modification: 2'-O-methoxyethylribose
  modified_base 5: mod_base = OTHER; note = sugar modification: 2'-O-methoxyethylribose; note = thymine; note = backbone modification: 5'-phosphorothioate
  modified_base 6: mod_base = OTHER; note = thymine; note = sugar modification: 2'-O-methoxyethylribose; note = backbone modification: 5'-phosphorothioate
  modified_base 7: mod_base = OTHER; note = backbone modification: 5'-phosphorothioate; note = sugar modification: 2'-O-methoxyethylribose
  modified_base 8: mod_base = OTHER; note = thymine; note = backbone modification: 5'-phosphorothioate; note = sugar modification: lna
  modified_base 9: mod_base = OTHER; note = backbone modification: 5'-phosphorothioate; note = sugar modification: 2'-O-methoxyethylribose
  modified_base 10: mod_base = OTHER; mod_base = m5c; note = backbone modification: 5'-phosphorothioate; note = sugar modification: 2'-O-methoxyethylribose
  modified_base 11: mod_base = OTHER; note = sugar modification: lna; note = backbone modification: 5'-phosphorothioate; note = thymine
  modified_base 12: mod_base = OTHER; note = thymine; note = backbone modification: 5'-phosphorothioate; note = sugar modification: lna
  modified_base 13: mod_base = OTHER; mod_base = m5c; note = sugar modification: 2'-O-methoxyethylribose; note = backbone modification: 5'-phosphorothioate
  modified_base 14: mod_base = OTHER; note = sugar modification: 2'-O-methoxyethylribose; note = backbone modification: 5'-phosphorothioate
  modified_base 15: mod_base = OTHER; note = sugar modification: 2'-O-methoxyethylribose; note = thymine
gttcttgtacttcat

SEQ ID NO: 774 - RNA, 15 nt, synthetic construct
  source 1..15: mol_type = other RNA; note = Antisense oligonucleotide
  modified_base 1: mod_base = OTHER; note = backbone modification: 5'-phosphorothioate; note = sugar modification: lna
  modified_base 2: mod_base = OTHER; note = sugar modification: 2'-O-methoxyethylribose; note = backbone modification: 5'-phosphorothioate; note = thymine
  modified_base 3: mod_base = OTHER; note = thymine; note = backbone modification: 5'-phosphorothioate; note = sugar modification: 2'-O-methoxyethylribose
  modified_base 4: mod_base = OTHER; mod_base = m5c; note = sugar modification: 2'-O-methoxyethylribose; note = backbone modification: 5'-phosphorothioate
  modified_base 5: mod_base = OTHER; note = sugar modification: 2'-O-methoxyethylribose; note = thymine; note = backbone modification: 5'-phosphorothioate
  modified_base 6: mod_base = OTHER; note = backbone modification: 5'-phosphorothioate; note = thymine; note = sugar modification: 2'-O-methoxyethylribose
  modified_base 7: mod_base = OTHER; note = backbone modification: 5'-phosphorothioate; note = sugar modification: lna
  modified_base 8: mod_base = OTHER; note = backbone modification: 5'-phosphorothioate; note = sugar modification: 2'-O-methoxyethylribose; note = thymine
  modified_base 9: mod_base = OTHER; note = sugar modification: lna; note = backbone modification: 5'-phosphorothioate
  modified_base 10: mod_base = m5c; mod_base = OTHER; note = sugar modification: lna; note = backbone modification: 5'-phosphorothioate
  modified_base 11: mod_base = OTHER; note = thymine; note = sugar modification: 2'-O-methoxyethylribose; note = backbone modification: 5'-phosphorothioate
  modified_base 12: mod_base = OTHER; note = sugar modification: 2'-O-methoxyethylribose; note = backbone modification: 5'-phosphorothioate; note = thymine
  modified_base 13: mod_base = m5c; mod_base = OTHER; note = backbone modification: 5'-phosphorothioate; note = sugar modification: 2'-O-methoxyethylribose
  modified_base 14: mod_base = OTHER; note = sugar modification: lna; note = backbone modification: 5'-phosphorothioate
  modified_base 15: mod_base = OTHER; note = thymine; note = sugar modification: 2'-O-methoxyethylribose
gttcttgtacttcat

SEQ ID NO: 775 - RNA, 15 nt, synthetic construct
  source 1..15: mol_type = other RNA; note = Antisense oligonucleotide
  modified_base 1: mod_base = OTHER; note = backbone modification: 5'-phosphorothioate; note = sugar modification: lna
  modified_base 2: mod_base = OTHER; note = backbone modification: 5'-phosphorothioate; note = thymine; note = sugar modification: 2'-O-methoxyethylribose
  modified_base 3: mod_base = OTHER; note = backbone modification: 5'-phosphorothioate; note = thymine; note = sugar modification: 2'-O-methoxyethylribose
  modified_base 4: mod_base = m5c; mod_base = OTHER; note = backbone modification: 5'-phosphorothioate; note = sugar modification: lna
  modified_base 5: mod_base = OTHER; note = thymine; note = backbone modification: 5'-phosphorothioate; note = sugar modification: lna
  modified_base 6: mod_base = OTHER; note = thymine; note = backbone modification: 5'-phosphorothioate; note = sugar modification: 2'-O-methoxyethylribose
  modified_base 7: mod_base = OTHER; note = backbone modification: 5'-phosphorothioate; note = sugar modification: lna
  modified_base 8: mod_base = OTHER; note = backbone modification: 5'-phosphorothioate; note = sugar modification: 2'-O-methoxyethylribose; note = thymine
  modified_base 9: mod_base = OTHER; note = backbone modification: 5'-phosphorothioate; note = sugar modification: 2'-O-methoxyethylribose
  modified_base 10: mod_base = OTHER; mod_base = m5c; note = backbone modification: 5'-phosphorothioate; note = sugar modification: 2'-O-methoxyethylribose
  modified_base 11: mod_base = OTHER; note = thymine; note = backbone modification: 5'-phosphorothioate; note = sugar modification: lna
  modified_base 12: mod_base = OTHER; note = thymine; note = sugar modification: 2'-O-methoxyethylribose; note = backbone modification: 5'-phosphorothioate
  modified_base 13: mod_base = OTHER; mod_base = m5c; note = backbone modification: 5'-phosphorothioate; note = sugar modification: 2'-O-methoxyethylribose
  modified_base 14: mod_base = OTHER; note = backbone modification: 5'-phosphorothioate; note = sugar modification: 2'-O-methoxyethylribose
  modified_base 15: mod_base = OTHER; note = sugar modification: 2'-O-methoxyethylribose; note = thymine
gttcttgtacttcat

SEQ ID NO: 776 - RNA, 15 nt, synthetic construct
  source 1..15: mol_type = other RNA; note = Antisense oligonucleotide
  modified_base 1: mod_base = OTHER; note = sugar modification: lna; note = backbone modification: 5'-phosphorothioate
  modified_base 2: mod_base = OTHER; note = backbone modification: 5'-phosphorothioate; note = thymine; note = sugar modification: 2'-O-methoxyethylribose
  modified_base 3: mod_base = OTHER; note = sugar modification: 2'-O-methoxyethylribose; note = thymine; note = backbone modification: 5'-phosphorothioate
  modified_base 4: mod_base = m5c; mod_base = OTHER; note = backbone modification: 5'-phosphorothioate; note = sugar modification: 2'-O-methoxyethylribose
  modified_base 5: mod_base = OTHER; note = sugar modification: 2'-O-methoxyethylribose; note = thymine; note = backbone modification: 5'-phosphorothioate
  modified_base 6: mod_base = OTHER; note = backbone modification: 5'-phosphorothioate; note = thymine; note = sugar modification: lna
  modified_base 7: mod_base = OTHER; note = backbone modification: 5'-phosphorothioate; note = sugar modification: 2'-O-methoxyethylribose
  modified_base 8: mod_base = OTHER; note = sugar modification: 2'-O-methoxyethylribose; note = thymine; note = backbone modification: 5'-phosphorothioate
  modified_base 9: mod_base = OTHER; note = backbone modification: 5'-phosphorothioate; note = sugar modification: lna
  modified_base 10: mod_base = m5c; mod_base = OTHER; note = backbone modification: 5'-phosphorothioate; note = sugar modification: 2'-O-methoxyethylribose
  modified_base 11: mod_base = OTHER; note = backbone modification: 5'-phosphorothioate; note = sugar modification: 2'-O-methoxyethylribose; note = thymine
  modified_base 12: mod_base = OTHER; note = sugar modification: lna; note = thymine; note = backbone modification: 5'-phosphorothioate
  modified_base 13: mod_base = OTHER; mod_base = m5c; note = sugar modification: lna; note = backbone modification: 5'-phosphorothioate
  modified_base 14: mod_base = OTHER; note = sugar modification: 2'-O-methoxyethylribose; note = backbone modification: 5'-phosphorothioate
  modified_base 15: mod_base = OTHER; note = sugar modification: lna; note = thymine
gttcttgtacttcat

SEQ ID NO: 777 - RNA, 15 nt, synthetic construct
  source 1..15: mol_type = other RNA; note = Antisense oligonucleotide
  modified_base 1: mod_base = OTHER; note = sugar modification: 2'-O-methoxyethylribose; note = backbone modification: 5'-phosphorothioate
  modified_base 2: mod_base = OTHER; note = backbone modification: 5'-phosphorothioate; note = thymine; note = sugar modification: lna
  modified_base 3: mod_base = OTHER; note = thymine; note = backbone modification: 5'-phosphorothioate; note = sugar modification: lna
  modified_base 4: mod_base = OTHER; mod_base = m5c; note = sugar modification: 2'-O-methoxyethylribose; note = backbone modification: 5'-phosphorothioate
  modified_base 5: mod_base = OTHER; note = backbone modification: 5'-phosphorothioate; note = thymine; note = sugar modification: 2'-O-methoxyethylribose
  modified_base 6: mod_base = OTHER; note = backbone modification: 5'-phosphorothioate; note = sugar modification: 2'-O-methoxyethylribose; note = thymine
  modified_base 7: mod_base = OTHER; note = backbone modification: 5'-phosphorothioate; note = sugar modification: lna
  modified_base 8: mod_base = OTHER; note = backbone modification: 5'-phosphorothioate; note = thymine; note = sugar modification: lna
  modified_base 9: mod_base = OTHER; note = sugar modification: lna; note = backbone modification: 5'-phosphorothioate
  modified_base 10: mod_base = OTHER; mod_base = m5c; note = backbone modification: 5'-phosphorothioate; note = sugar modification: lna
  modified_base 11: mod_base = OTHER; note = sugar modification: 2'-O-methoxyethylribose; note = thymine; note = backbone modification: 5'-phosphorothioate
  modified_base 12: mod_base = OTHER; note = thymine; note = backbone modification: 5'-phosphorothioate; note = sugar modification: 2'-O-methoxyethylribose
  modified_base 13: mod_base = m5c; mod_base = OTHER; note = backbone modification: 5'-phosphorothioate; note = sugar modification: 2'-O-methoxyethylribose
  modified_base 14: mod_base = OTHER; note = sugar modification: 2'-O-methoxyethylribose; note = backbone modification: 5'-phosphorothioate
  modified_base 15: mod_base = OTHER; note = sugar modification: 2'-O-methoxyethylribose; note = thymine
gttcttgtacttcat

SEQ ID NO: 778 - RNA, 15 nt, synthetic construct
  source 1..15: mol_type = other RNA; note = Antisense oligonucleotide
  modified_base 1: mod_base = OTHER; note = backbone modification: 5'-phosphorothioate; note = sugar modification: 2'-O-methoxyethylribose
  modified_base 2: mod_base = OTHER; note = sugar modification: 2'-O-methoxyethylribose; note = backbone modification: 5'-phosphorothioate; note = thymine
  modified_base 3: mod_base = OTHER; note = sugar modification: lna; note = thymine; note = backbone modification: 5'-phosphorothioate
  modified_base 4: mod_base = OTHER; mod_base = m5c; note = backbone modification: 5'-phosphorothioate; note = sugar modification: 2'-O-methoxyethylribose
  modified_base 5: mod_base = OTHER; note = backbone modification: 5'-phosphorothioate; note = sugar modification: 2'-O-methoxyethylribose; note = thymine
  modified_base 6: mod_base = OTHER; note = sugar modification: 2'-O-methoxyethylribose; note = backbone modification: 5'-phosphorothioate; note = thymine
  modified_base 7: mod_base = OTHER; note = backbone modification: 5'-phosphorothioate; note = sugar modification: 2'-O-methoxyethylribose
  modified_base 8: mod_base = OTHER; note = backbone modification: 5'-phosphorothioate; note = sugar modification: lna; note = thymine
  modified_base 9: mod_base = OTHER; note = sugar modification: lna; note = backbone modification: 5'-phosphorothioate
  modified_base 10: mod_base = OTHER; mod_base = m5c; note = sugar modification: lna; note = backbone modification: 5'-phosphorothioate
  modified_base 11: mod_base = OTHER; note = backbone modification: 5'-phosphorothioate; note = thymine; note = sugar modification: 2'-O-methoxyethylribose
  modified_base 12: mod_base = OTHER; note = backbone modification: 5'-phosphorothioate; note = sugar modification: 2'-O-methoxyethylribose; note = thymine
  modified_base 13: mod_base = m5c; mod_base = OTHER; note = backbone modification: 5'-phosphorothioate; note = sugar modification: lna
  modified_base 14: mod_base = OTHER; note = backbone modification: 5'-phosphorothioate; note = sugar modification: 2'-O-methoxyethylribose
  modified_base 15: mod_base = OTHER; note = thymine; note = sugar modification: lna
gttcttgtacttcat

SEQ ID NO: 779 - RNA, 15 nt, synthetic construct
  source 1..15: mol_type = other RNA; note = Antisense oligonucleotide
  modified_base 1: mod_base = OTHER; note = backbone modification: 5'-phosphorothioate; note = sugar modification: 2'-O-methoxyethylribose
  modified_base 2: mod_base = OTHER; note = backbone modification: 5'-phosphorothioate; note = thymine; note = sugar modification: 2'-O-methoxyethylribose
  modified_base 3: mod_base = OTHER; note = backbone modification: 5'-phosphorothioate; note = sugar modification: 2'-O-methoxyethylribose; note = thymine
  modified_base 4: mod_base = m5c; mod_base = OTHER; note = sugar modification: lna; note = backbone modification: 5'-phosphorothioate
  modified_base 5: mod_base = OTHER; note = backbone modification: 5'-phosphorothioate; note = sugar modification: lna; note = thymine
  modified_base 6: mod_base = OTHER; note = backbone modification: 5'-phosphorothioate; note = sugar modification: 2'-O-methoxyethylribose; note = thymine
  modified_base 7: mod_base = OTHER; note = backbone modification: 5'-phosphorothioate; note = sugar modification: 2'-O-methoxyethylribose
  modified_base 8: mod_base = OTHER; note = backbone modification: 5'-phosphorothioate; note = sugar modification: lna; note = thymine
  modified_base 9: mod_base = OTHER; note = backbone modification: 5'-phosphorothioate; note = sugar modification: 2'-O-methoxyethylribose
  modified_base 10: mod_base = m5c; mod_base = OTHER; note = backbone modification: 5'-phosphorothioate; note = sugar modification: 2'-O-methoxyethylribose
  modified_base 11: mod_base = OTHER; note = thymine; note = backbone modification: 5'-phosphorothioate; note = sugar modification: lna
  modified_base 12: mod_base = OTHER; note = sugar modification: lna; note = thymine; note = backbone modification: 5'-phosphorothioate
  modified_base 13: mod_base = OTHER; mod_base = m5c; note = backbone modification: 5'-phosphorothioate; note = sugar modification: 2'-O-methoxyethylribose
  modified_base 14: mod_base = OTHER; note = sugar modification: lna; note = backbone modification: 5'-phosphorothioate
  modified_base 15: mod_base = OTHER; note = thymine; note = sugar modification: 2'-O-methoxyethylribose
gttcttgtacttcat

SEQ ID NO: 780 - RNA, 14 nt, synthetic construct
  source 1..14: mol_type = other RNA; note = Antisense oligonucleotide
  modified_base 1: mod_base = OTHER; note = sugar modification: 2'-O-methoxyethylribose; note = backbone modification: 5'-phosphorothioate; note = thymine
  modified_base 2: mod_base = m5c; mod_base = OTHER; note = backbone modification: 5'-phosphorothioate; note = sugar modification: 2'-O-methoxyethylribose
  modified_base 3: mod_base = OTHER; note = sugar modification: 2'-O-methoxyethylribose; note = backbone modification: 5'-phosphorothioate
  modified_base 4: mod_base = OTHER; note = sugar modification: 2'-O-methoxyethylribose; note = thymine; note = backbone modification: 5'-phosphorothioate
  modified_base 5: mod_base = OTHER; mod_base = m5c; note = sugar modification: 2'-O-methoxyethylribose; note = backbone modification: 5'-phosphorothioate
  modified_base 6: mod_base = OTHER; mod_base = m5c; note = sugar modification: 2'-O-methoxyethylribose; note = backbone modification: 5'-phosphorothioate
  modified_base 7: mod_base = m5c; mod_base = OTHER; note = backbone modification: 5'-phosphorothioate; note = sugar modification: 2'-O-methoxyethylribose
  modified_base 8: mod_base = OTHER; note = sugar modification: 2'-O-methoxyethylribose; note = backbone modification: 5'-phosphorothioate
  modified_base 9: mod_base = m5c; mod_base = OTHER; note = backbone modification: 5'-phosphorothioate; note = sugar modification: 2'-O-methoxyethylribose
  modified_base 10: mod_base = OTHER; note = thymine; note = sugar modification: 2'-O-methoxyethylribose; note = backbone modification: 5'-phosphorothioate
  modified_base 11: mod_base = OTHER; note = backbone modification: 5'-phosphorothioate; note = sugar modification: 2'-O-methoxyethylribose
  modified_base 12: mod_base = OTHER; note = sugar modification: 2'-O-methoxyethylribose; note = backbone modification: 5'-phosphorothioate
  modified_base 13: mod_base = OTHER; note = backbone modification: 5'-phosphorothioate; note = sugar modification: 2'-O-methoxyethylribose; note = thymine
  modified_base 14: mod_base = OTHER; note = thymine; note = sugar modification: 2'-O-methoxyethylribose
tcatcccactgatt

SEQ ID NO: 781 - RNA, 16 nt, synthetic construct
  source 1..16: mol_type = other RNA; note = Antisense oligonucleotide
  modified_base 1: mod_base = OTHER; note = backbone modification: 5'-phosphorothioate; note = thymine; note = sugar modification: 2'-O-methoxyethylribose
  modified_base 2: mod_base = m5c; mod_base = OTHER; note = backbone modification: 5'-phosphorothioate; note = sugar modification: 2'-O-methoxyethylribose
  modified_base 3: mod_base = OTHER; note = sugar modification: 2'-O-methoxyethylribose; note = backbone modification: 5'-phosphorothioate
  modified_base 4: mod_base = OTHER; note = backbone modification: 5'-phosphorothioate; note = sugar modification: 2'-O-methoxyethylribose; note = thymine
  modified_base 5: mod_base = m5c; mod_base = OTHER; note = sugar modification: 2'-O-methoxyethylribose; note = backbone modification: 5'-phosphorothioate
  modified_base 6: mod_base = m5c; mod_base = OTHER; note = backbone modification: 5'-phosphorothioate; note = sugar modification: 2'-O-methoxyethylribose
  modified_base 7: mod_base = OTHER; mod_base = m5c; note = backbone modification: 5'-phosphorothioate; note = sugar modification: 2'-O-methoxyethylribose
  modified_base 8: mod_base = OTHER; note = sugar modification: 2'-O-methoxyethylribose; note = backbone modification: 5'-phosphorothioate
  modified_base 9: mod_base = m5c; mod_base = OTHER; note = backbone modification: 5'-phosphorothioate; note = sugar modification: 2'-O-methoxyethylribose
  modified_base 10: mod_base = OTHER; note = thymine; note = sugar modification: 2'-O-methoxyethylribose; note = backbone modification: 5'-phosphorothioate
  modified_base 11: mod_base = OTHER; note = sugar modification: 2'-O-methoxyethylribose; note = backbone modification: 5'-phosphorothioate
  modified_base 12: mod_base = OTHER; note = backbone modification: 5'-phosphorothioate; note = sugar modification: 2'-O-methoxyethylribose
  modified_base 13: mod_base = OTHER; note = thymine; note = backbone modification: 5'-phosphorothioate; note = sugar modification: 2'-O-methoxyethylribose
  modified_base 14: mod_base = OTHER; note = backbone modification: 5'-phosphorothioate; note = thymine; note = sugar modification: 2'-O-methoxyethylribose
  modified_base 15: mod_base = OTHER; mod_base = m5c; note = backbone modification: 5'-phosphorothioate; note = sugar modification: 2'-O-methoxyethylribose
  modified_base 16: mod_base = OTHER; note = thymine; note = sugar modification: 2'-O-methoxyethylribose
tcatcccactgattct

SEQ ID NO: 782 - RNA, 20 nt, synthetic construct
  source 1..20: mol_type = other RNA; note = Antisense oligonucleotide
  modified_base 1: mod_base = OTHER; note = sugar modification: 2'-O-methoxyethylribose; note = thymine; note = backbone modification: 5'-phosphorothioate
  modified_base 2: mod_base = OTHER; mod_base = m5c; note = sugar modification: 2'-O-methoxyethylribose; note = backbone modification: 5'-phosphorothioate
  modified_base 3: mod_base = OTHER; note = sugar modification: 2'-O-methoxyethylribose; note = backbone modification: 5'-phosphorothioate
  modified_base 4: mod_base = OTHER; note = backbone modification: 5'-phosphorothioate; note = thymine; note = sugar modification: 2'-O-methoxyethylribose
  modified_base 5: mod_base = m5c; mod_base = OTHER; note = backbone modification: 5'-phosphorothioate; note = sugar modification: 2'-O-methoxyethylribose
  modified_base 6: mod_base = OTHER; mod_base = m5c; note = backbone modification: 5'-phosphorothioate; note = sugar modification: 2'-O-methoxyethylribose
  modified_base 7: mod_base = OTHER; mod_base = m5c; note = sugar modification: 2'-O-methoxyethylribose; note = backbone modification: 5'-phosphorothioate
  modified_base 8: mod_base = OTHER; note = backbone modification: 5'-phosphorothioate; note = sugar modification: 2'-O-methoxyethylribose
  modified_base 9: mod_base = OTHER; mod_base = m5c; note = sugar modification: 2'-O-methoxyethylribose; note = backbone modification: 5'-phosphorothioate
  modified_base 10: mod_base = OTHER; note = thymine; note = sugar modification: 2'-O-methoxyethylribose; note = backbone modification: 5'-phosphorothioate
  modified_base 11: mod_base = OTHER; note = backbone modification: 5'-phosphorothioate; note = sugar modification: 2'-O-methoxyethylribose
  modified_base 12: mod_base = OTHER; note = sugar modification: 2'-O-methoxyethylribose; note = backbone modification: 5'-phosphorothioate
  modified_base 13: mod_base = OTHER; note = sugar modification: 2'-O-methoxyethylribose; note = backbone modification: 5'-phosphorothioate; note = thymine
  modified_base 14: mod_base = OTHER; note = thymine; note = backbone modification: 5'-phosphorothioate; note = sugar modification: 2'-O-methoxyethylribose
  modified_base 15: mod_base = m5c; mod_base = OTHER; note = backbone modification: 5'-phosphorothioate; note = sugar modification: 2'-O-methoxyethylribose
  modified_base 16: mod_base = OTHER; note = sugar modification: 2'-O-methoxyethylribose; note = thymine; note = backbone modification: 5'-phosphorothioate
  modified_base 17: mod_base = OTHER; note = sugar modification: 2'-O-methoxyethylribose; note = backbone modification: 5'-phosphorothioate
  modified_base 18: mod_base = OTHER; note = backbone modification: 5'-phosphorothioate; note = sugar modification: 2'-O-methoxyethylribose
  modified_base 19: mod_base = OTHER; note = backbone modification: 5'-phosphorothioate; note = sugar modification: 2'-O-methoxyethylribose
  modified_base 20: mod_base = OTHER; note = sugar modification: 2'-O-methoxyethylribose; note = thymine
tcatcccactgattctgaat

SEQ ID NO: 783 - RNA, 22 nt, synthetic construct
  source 1..22: mol_type = other RNA; note = Antisense oligonucleotide
  modified_base 1: mod_base = OTHER; note = sugar modification: 2'-O-methoxyethylribose; note = thymine; note = backbone modification: 5'-phosphorothioate
  modified_base 2: mod_base = m5c; mod_base = OTHER; note = sugar modification: 2'-O-methoxyethylribose; note = backbone modification: 5'-phosphorothioate
  modified_base 3: mod_base = OTHER; note = backbone modification: 5'-phosphorothioate; note = sugar modification: 2'-O-methoxyethylribose
  modified_base 4: mod_base = OTHER; note = thymine; note = backbone modification: 5'-phosphorothioate; note = sugar modification: 2'-O-methoxyethylribose
  modified_base 5: mod_base = m5c; mod_base = OTHER; note = backbone modification: 5'-phosphorothioate; note = sugar modification: 2'-O-methoxyethylribose
  modified_base 6: mod_base = m5c; mod_base = OTHER; note = sugar modification: 2'-O-methoxyethylribose; note = backbone modification: 5'-phosphorothioate
  modified_base 7: mod_base = OTHER; mod_base = m5c; note = backbone modification: 5'-phosphorothioate; note = sugar modification: 2'-O-methoxyethylribose
  modified_base 8: mod_base = OTHER; note = backbone modification: 5'-phosphorothioate; note = sugar modification: 2'-O-methoxyethylribose
  modified_base 9: mod_base = m5c; mod_base = OTHER; note = backbone modification: 5'-phosphorothioate; note = sugar modification: 2'-O-methoxyethylribose
  modified_base 10: mod_base = OTHER; note = backbone modification: 5'-phosphorothioate; note = thymine; note = sugar modification: 2'-O-methoxyethylribose
  modified_base 11: mod_base = OTHER; note = backbone modification: 5'-phosphorothioate; note = sugar modification: 2'-O-methoxyethylribose
  modified_base 12: mod_base = OTHER; note = backbone modification: 5'-phosphorothioate; note = sugar modification: 2'-O-methoxyethylribose
  modified_base 13: mod_base = OTHER; note = backbone modification: 5'-phosphorothioate; note = thymine; note = sugar modification: 2'-O-methoxyethylribose
  modified_base 14: mod_base = OTHER; note = backbone modification: 5'-phosphorothioate; note = thymine; note = sugar modification: 2'-O-methoxyethylribose
  modified_base 15: mod_base = OTHER; mod_base = m5c; note = sugar modification: 2'-O-methoxyethylribose; note = backbone modification: 5'-phosphorothioate
  modified_base 16: mod_base = OTHER; note = backbone modification: 5'-phosphorothioate; note = thymine; note = sugar modification: 2'-O-methoxyethylribose
  modified_base 17: mod_base = OTHER; note = backbone modification: 5'-phosphorothioate; note = sugar modification: 2'-O-methoxyethylribose
  modified_base 18: mod_base = OTHER; note = sugar modification: 2'-O-methoxyethylribose; note = backbone modification: 5'-phosphorothioate
  modified_base 19: mod_base = OTHER; note = sugar modification: 2'-O-methoxyethylribose; note = backbone modification: 5'-phosphorothioate
  modified_base 20: mod_base = OTHER; note = backbone modification: 5'-phosphorothioate; note = thymine; note = sugar modification: 2'-O-methoxyethylribose
  modified_base 21: mod_base = OTHER; note = backbone modification: 5'-phosphorothioate; note = thymine; note = sugar modification: 2'-O-methoxyethylribose
  modified_base 22: mod_base = m5c; mod_base = OTHER; note = sugar modification: 2'-O-methoxyethylribose
tcatcccactgattctgaattc

SEQ ID NO: 784 - RNA, 14 nt, synthetic construct
  source 1..14: mol_type = other RNA; note = Antisense oligonucleotide
  modified_base 1: mod_base = m5c; mod_base = OTHER; note = backbone modification: 5'-phosphorothioate; note = sugar modification: 2'-O-methoxyethylribose
  modified_base 2: mod_base = m5c; mod_base = OTHER; note = sugar modification: 2'-O-methoxyethylribose; note = backbone modification: 5'-phosphorothioate
  modified_base 3: mod_base = OTHER; mod_base = m5c; note = sugar modification: 2'-O-methoxyethylribose; note = backbone modification: 5'-phosphorothioate
  modified_base 4: mod_base = OTHER; note = sugar modification: 2'-O-methoxyethylribose; note = backbone modification: 5'-phosphorothioate
  modified_base 5: mod_base = OTHER; mod_base = m5c; note = sugar modification: 2'-O-methoxyethylribose; note = backbone modification: 5'-phosphorothioate
  modified_base 6: mod_base = OTHER; note = thymine; note = sugar modification: 2'-O-methoxyethylribose; note = backbone modification: 5'-phosphorothioate
  modified_base 7: mod_base = OTHER; note = sugar modification: 2'-O-methoxyethylribose; note = backbone modification: 5'-phosphorothioate
  modified_base 8: mod_base = OTHER; note = sugar modification: 2'-O-methoxyethylribose; note = backbone modification: 5'-phosphorothioate
  modified_base 9: mod_base = OTHER; note = backbone modification: 5'-phosphorothioate; note = thymine; note = sugar modification: 2'-O-methoxyethylribose
  modified_base 10: mod_base = OTHER; note = thymine; note = sugar modification: 2'-O-methoxyethylribose; note = backbone modification: 5'-phosphorothioate
  modified_base 11: mod_base = OTHER; mod_base = m5c; note = backbone modification: 5'-phosphorothioate; note = sugar modification: 2'-O-methoxyethylribose
  modified_base 12: mod_base = OTHER; note = sugar modification: 2'-O-methoxyethylribose; note = thymine; note = backbone modification: 5'-phosphorothioate
  modified_base 13: mod_base = OTHER; note = backbone modification: 5'-phosphorothioate; note = sugar modification: 2'-O-methoxyethylribose
  modified_base 14: mod_base = OTHER; note = sugar modification: 2'-O-methoxyethylribose
cccactgattctga

SEQ ID NO: 785 - RNA, 16 nt, synthetic construct
  source 1..16: mol_type = other RNA; note = Antisense oligonucleotide
  modified_base 1: mod_base = OTHER; note = sugar modification: 2'-O-methoxyethylribose; note = backbone modification: 5'-phosphorothioate
  modified_base 2: mod_base = OTHER; note = sugar modification: 2'-O-methoxyethylribose; note = backbone modification: 5'-phosphorothioate; note = thymine
  modified_base 3: mod_base = m5c; mod_base = OTHER; note = sugar modification: 2'-O-methoxyethylribose; note = backbone modification: 5'-phosphorothioate
  modified_base 4: mod_base = m5c; mod_base = OTHER; note = backbone modification: 5'-phosphorothioate; note = sugar modification: 2'-O-methoxyethylribose
  modified_base 5: mod_base = OTHER; mod_base = m5c; note = sugar modification: 2'-O-methoxyethylribose; note = backbone modification: 5'-phosphorothioate
  modified_base 6: mod_base = OTHER; note = backbone modification: 5'-phosphorothioate; note = sugar modification: 2'-O-methoxyethylribose
  modified_base 7: mod_base = OTHER; mod_base = m5c; note = sugar modification: 2'-O-methoxyethylribose; note = backbone modification: 5'-phosphorothioate
  modified_base 8: mod_base = OTHER; note = thymine; note = sugar modification: 2'-O-methoxyethylribose; note = backbone modification: 5'-phosphorothioate
  modified_base 9: mod_base = OTHER; note = sugar modification: 2'-O-methoxyethylribose; note = backbone modification: 5'-phosphorothioate
  modified_base 10: mod_base = OTHER; note = backbone modification: 5'-phosphorothioate; note = sugar modification: 2'-O-methoxyethylribose
  modified_base 11: mod_base = OTHER; note = backbone modification: 5'-phosphorothioate; note = thymine; note = sugar modification: 2'-O-methoxyethylribose
  modified_base 12: mod_base = OTHER; note = thymine; note = sugar modification: 2'-O-methoxyethylribose; note = backbone modification: 5'-phosphorothioate
  modified_base 13: mod_base = OTHER; mod_base = m5c; note = backbone modification: 5'-phosphorothioate; note = sugar modification: 2'-O-methoxyethylribose
  modified_base 14: mod_base = OTHER; note = backbone modification: 5'-phosphorothioate; note = thymine; note = sugar modification: 2'-O-methoxyethylribose
  modified_base 15: mod_base = OTHER; note = backbone modification: 5'-phosphorothioate; note = sugar modification: 2'-O-methoxyethylribose
  modified_base 16: mod_base = OTHER; note = sugar modification: 2'-O-methoxyethylribose
atcccactgattctga

SEQ ID NO: 786 - RNA, 20 nt, synthetic construct
  source 1..20: mol_type = other RNA; note = Antisense oligonucleotide
  modified_base 1: mod_base = OTHER; mod_base = m5c; note = backbone modification: 5'-phosphorothioate; note = sugar modification: 2'-O-methoxyethylribose
  modified_base 2: mod_base = OTHER; note = thymine; note = backbone modification: 5'-phosphorothioate; note = sugar modification: 2'-O-methoxyethylribose
  modified_base 3: mod_base = OTHER; note = sugar modification: 2'-O-methoxyethylribose; note = thymine; note = backbone modification: 5'-phosphorothioate
  modified_base 4: mod_base = OTHER; mod_base = m5c; note = backbone modification: 5'-phosphorothioate; note = sugar modification: 2'-O-methoxyethylribose
  modified_base 5: mod_base = OTHER; note = sugar modification: 2'-O-methoxyethylribose; note = backbone modification: 5'-phosphorothioate
  modified_base 6: mod_base = OTHER; note = sugar modification: 2'-O-methoxyethylribose; note = thymine; note = backbone modification: 5'-phosphorothioate
  modified_base 7: mod_base = m5c; mod_base = OTHER; note = sugar modification: 2'-O-methoxyethylribose; note = backbone modification: 5'-phosphorothioate
  modified_base 8: mod_base = OTHER; mod_base = m5c; note = backbone modification: 5'-phosphorothioate; note = sugar modification: 2'-O-methoxyethylribose
  modified_base 9: mod_base = OTHER; mod_base = m5c; note = backbone modification: 5'-phosphorothioate; note = sugar modification: 2'-O-methoxyethylribose
  modified_base 10: mod_base = OTHER; note = backbone modification: 5'-phosphorothioate; note = sugar modification: 2'-O-methoxyethylribose
  modified_base 11: mod_base = OTHER; mod_base = m5c; note = sugar modification: 2'-O-methoxyethylribose; note = backbone modification: 5'-phosphorothioate
  modified_base 12: mod_base = OTHER; note = thymine; note = backbone modification: 5'-phosphorothioate; note = sugar modification: 2'-O-methoxyethylribose
  modified_base 13: mod_base = OTHER; note = sugar modification: 2'-O-methoxyethylribose; note = backbone modification: 5'-phosphorothioate
  modified_base 14: mod_base = OTHER; note = sugar modification: 2'-O-methoxyethylribose; note = backbone modification: 5'-phosphorothioate
  modified_base 15: mod_base = OTHER; note = thymine; note = sugar modification: 2'-O-methoxyethylribose; note = backbone modification: 5'-phosphorothioate
  modified_base 16: mod_base = OTHER; note = thymine; note = sugar modification: 2'-O-methoxyethylribose; note = backbone modification: 5'-phosphorothioate
  modified_base 17: mod_base = m5c; mod_base = OTHER; note = backbone modification: 5'-phosphorothioate; note = sugar modification: 2'-O-methoxyethylribose
  modified_base 18: mod_base = OTHER; note = backbone modification: 5'-phosphorothioate; note = sugar modification: 2'-O-methoxyethylribose; note = thymine
  modified_base 19: mod_base = OTHER; note = sugar modification: 2'-O-methoxyethylribose; note = backbone modification: 5'-phosphorothioate
  modified_base 20: mod_base = OTHER; note = sugar modification: 2'-O-methoxyethylribose
cttcatcccactgattctga

SEQ ID NO: 787 - RNA, 22 nt, synthetic construct
  source 1..22: mol_type = other RNA; note = Antisense oligonucleotide
  modified_base 1: mod_base = OTHER; note = thymine; note = backbone modification: 5'-phosphorothioate; note = sugar modification: 2'-O-methoxyethylribose
  modified_base 2: mod_base = OTHER; note = backbone modification: 5'-phosphorothioate; note = sugar modification: 2'-O-methoxyethylribose
  modified_base 3: mod_base = OTHER; mod_base = m5c; note = backbone modification: 5'-phosphorothioate; note = sugar modification: 2'-O-methoxyethylribose
  modified_base 4: mod_base = OTHER; note = thymine; note = sugar modification: 2'-O-methoxyethylribose; note = backbone modification: 5'-phosphorothioate
  modified_base 5: mod_base = OTHER; note = backbone modification: 5'-phosphorothioate; note = sugar modification: 2'-O-methoxyethylribose; note = thymine
  modified_base 6: mod_base = m5c; mod_base = OTHER; note = backbone modification: 5'-phosphorothioate; note = sugar modification: 2'-O-methoxyethylribose
  modified_base 7: mod_base = OTHER; note = sugar modification: 2'-O-methoxyethylribose; note = backbone modification: 5'-phosphorothioate
  modified_base 8: mod_base = OTHER; note = backbone modification: 5'-phosphorothioate; note = thymine; note = sugar modification: 2'-O-methoxyethylribose
  modified_base 9: mod_base = OTHER; mod_base = m5c; note = sugar modification: 2'-O-methoxyethylribose; note = backbone modification: 5'-phosphorothioate
  modified_base 10: mod_base = OTHER; mod_base = m5c; note = backbone modification: 5'-phosphorothioate; note = sugar modification: 2'-O-methoxyethylribose
  modified_base 11: mod_base = OTHER; mod_base = m5c; note = sugar modification: 2'-O-methoxyethylribose; note = backbone modification: 5'-phosphorothioate
  modified_base 12: mod_base = OTHER; note = backbone modification: 5'-phosphorothioate; note = sugar modification: 2'-O-methoxyethylribose
  modified_base 13: mod_base = OTHER; mod_base = m5c; note = backbone modification: 5'-phosphorothioate; note = sugar modification: 2'-O-methoxyethylribose
  modified_base 14: mod_base = OTHER; note = thymine; note = backbone modification: 5'-phosphorothioate; note = sugar modification: 2'-O-methoxyethylribose
  modified_base 15: mod_base = OTHER; note = sugar modification: 2'-O-methoxyethylribose; note = backbone modification: 5'-phosphorothioate
  modified_base 16: mod_base = OTHER; note = backbone modification: 5'-phosphorothioate; note = sugar modification: 2'-O-methoxyethylribose
  modified_base 17: mod_base = OTHER; note = backbone modification: 5'-phosphorothioate; note = sugar modification: 2'-O-methoxyethylribose; note = thymine
  modified_base 18: mod_base = OTHER; note = backbone modification: 5'-phosphorothioate; note = sugar modification: 2'-O-methoxyethylribose; note = thymine
  modified_base 19: mod_base = m5c; mod_base = OTHER; note = backbone modification: 5'-phosphorothioate; note = sugar modification: 2'-O-methoxyethylribose
  modified_base 20: mod_base = OTHER; note = sugar modification: 2'-O-methoxyethylribose; note = thymine; note = backbone modification: 5'-phosphorothioate
  modified_base 21: mod_base = OTHER; note = sugar modification: 2'-O-methoxyethylribose; note = backbone modification: 5'-phosphorothioate
  modified_base 22: mod_base = OTHER; note = sugar modification: 2'-O-methoxyethylribose
tacttcatcccactgattctga

SEQ ID NO: 788 - RNA, 14 nt, synthetic construct
  source 1..14: mol_type = other RNA; note = Antisense oligonucleotide
  modified_base 1: mod_base = OTHER; note = backbone modification: 5'-phosphorothioate; note = sugar modification: 2'-O-methoxyethylribose
  modified_base 2: mod_base = OTHER; note = thymine; note = backbone modification: 5'-phosphorothioate; note = sugar modification: 2'-O-methoxyethylribose
  modified_base 3: mod_base = m5c; mod_base = OTHER; note = sugar modification: 2'-O-methoxyethylribose; note = backbone modification: 5'-phosphorothioate
  modified_base 4: mod_base = m5c; mod_base = OTHER; note = backbone modification: 5'-phosphorothioate; note = sugar modification: 2'-O-methoxyethylribose
  modified_base 5: mod_base = m5c; mod_base = OTHER; note = backbone modification: 5'-phosphorothioate; note = sugar modification: 2'-O-methoxyethylribose
  modified_base 6: mod_base = OTHER; note = backbone modification: 5'-phosphorothioate; note = sugar modification: 2'-O-methoxyethylribose
  modified_base 7: mod_base = m5c; mod_base = OTHER; note = backbone modification: 5'-phosphorothioate; note = sugar modification: 2'-O-methoxyethylribose
  modified_base 8: mod_base = OTHER; note = thymine; note = backbone modification: 5'-phosphorothioate; note = sugar modification: 2'-O-methoxyethylribose
  modified_base 9: mod_base = OTHER; note = backbone modification: 5'-phosphorothioate; note = sugar modification: 2'-O-methoxyethylribose
  modified_base 10: mod_base = OTHER; note = backbone modification: 5'-phosphorothioate; note = sugar modification: 2'-O-methoxyethylribose
  modified_base 11: mod_base = OTHER; note = thymine; note = sugar modification: 2'-O-methoxyethylribose; note = backbone modification: 5'-phosphorothioate
  modified_base 12: mod_base = OTHER; note = backbone modification: 5'-phosphorothioate; note = sugar modification: 2'-O-methoxyethylribose; note = thymine
  modified_base 13: mod_base = OTHER; mod_base = m5c; note = sugar modification: 2'-O-methoxyethylribose; note = backbone modification: 5'-phosphorothioate
  modified_base 14: mod_base = OTHER; note = thymine; note = sugar modification: 2'-O-methoxyethylribose
atcccactgattct

SEQ ID NO: 789 - RNA, 16 nt, synthetic construct
  source 1..16: mol_type = other RNA; note = Antisense oligonucleotide
  modified_base 1: mod_base = m5c; mod_base = OTHER; note = backbone modification: 5'-phosphorothioate; note = sugar modification: 2'-O-methoxyethylribose
  modified_base 2: mod_base = OTHER; note = backbone modification: 5'-phosphorothioate; note = sugar modification: 2'-O-methoxyethylribose
  modified_base 3: mod_base = OTHER; note = sugar modification: 2'-O-methoxyethylribose; note = thymine; note = backbone modification: 5'-phosphorothioate
  modified_base 4: mod_base = OTHER; mod_base = m5c; note = sugar modification: 2'-O-methoxyethylribose; note = backbone modification: 5'-phosphorothioate
  modified_base 5: mod_base = m5c; mod_base = OTHER; note = backbone modification: 5'-phosphorothioate; note = sugar modification: 2'-O-methoxyethylribose
  modified_base 6: mod_base = m5c; mod_base = OTHER; note = backbone modification: 5'-phosphorothioate; note = sugar modification: 2'-O-methoxyethylribose
  modified_base 7: mod_base = OTHER; note = backbone modification: 5'-phosphorothioate; note = sugar modification: 2'-O-methoxyethylribose
  modified_base 8: mod_base = OTHER; mod_base = m5c; note = sugar modification: 2'-O-methoxyethylribose; note = backbone modification: 5'-phosphorothioate
  modified_base 9: mod_base = OTHER; note = sugar modification: 2'-O-methoxyethylribose; note = thymine; note = backbone modification: 5'-phosphorothioate
  modified_base 10: mod_base = OTHER; note = backbone modification: 5'-phosphorothioate; note = sugar modification: 2'-O-methoxyethylribose
  modified_base 11: mod_base = OTHER; note = backbone modification: 5'-phosphorothioate; note = sugar modification: 2'-O-methoxyethylribose
  modified_base 12: mod_base = OTHER; note = sugar modification: 2'-O-methoxyethylribose; note = backbone modification: 5'-phosphorothioate; note = thymine
  modified_base 13: mod_base = OTHER; note = backbone modification: 5'-phosphorothioate; note = thymine; note = sugar modification: 2'-O-methoxyethylribose
  modified_base 14: mod_base = OTHER; mod_base = m5c; note = sugar modification: 2'-O-methoxyethylribose; note = backbone modification: 5'-phosphorothioate
  modified_base 15: mod_base = OTHER; note = sugar modification: 2'-O-methoxyethylribose; note = backbone modification: 5'-phosphorothioate; note = thymine
  modified_base 16: mod_base = OTHER; note = sugar modification: 2'-O-methoxyethylribose
catcccactgattctg

SEQ ID NO: 790 - RNA, 20 nt, synthetic construct
  source 1..20: mol_type = other RNA; note = Antisense oligonucleotide
  modified_base 1: mod_base = OTHER; note = thymine; note = backbone modification: 5'-phosphorothioate; note = sugar modification: 2'-O-methoxyethylribose
  modified_base 2: mod_base = OTHER; note = backbone modification: 5'-phosphorothioate; note = thymine; note = sugar modification: 2'-O-methoxyethylribose
  modified_base 3: mod_base = m5c; mod_base = OTHER; note = sugar modification: 2'-O-methoxyethylribose; note = backbone modification: 5'-phosphorothioate
  modified_base 4: mod_base = OTHER; note = backbone modification: 5'-phosphorothioate; note = sugar modification: 2'-O-methoxyethylribose
  modified_base 5: mod_base = OTHER; note = thymine; note = sugar modification: 2'-O-methoxyethylribose; note = backbone modification: 5'-phosphorothioate
  modified_base 6: mod_base = m5c; mod_base = OTHER; note = backbone modification: 5'-phosphorothioate; note = sugar modification: 2'-O-methoxyethylribose
  modified_base 7: mod_base = m5c; mod_base = OTHER; note = backbone modification: 5'-phosphorothioate; note = sugar modification: 2'-O-methoxyethylribose
  modified_base 8: mod_base = OTHER; mod_base = m5c; note = sugar modification: 2'-O-methoxyethylribose; note = backbone modification: 5'-phosphorothioate
  modified_base 9: mod_base = OTHER; note = sugar modification: 2'-O-methoxyethylribose; note = backbone modification: 5'-phosphorothioate
  modified_base 10: mod_base = OTHER; mod_base = m5c; note = sugar modification: 2'-O-methoxyethylribose; note = backbone modification: 5'-phosphorothioate
  modified_base 11: mod_base = OTHER; note = backbone modification: 5'-phosphorothioate; note = thymine; note = sugar modification: 2'-O-methoxyethylribose
  modified_base 12: mod_base = OTHER; note = sugar modification: 2'-O-methoxyethylribose; note = backbone modification: 5'-phosphorothioate
  modified_base 13: mod_base = OTHER; note = backbone modification: 5'-phosphorothioate; note = sugar modification: 2'-O-methoxyethylribose
  modified_base 14: mod_base = OTHER; note = thymine; note = sugar modification: 2'-O-methoxyethylribose; note = backbone modification: 5'-phosphorothioate
  modified_base 15: mod_base = OTHER; note = sugar modification: 2'-O-methoxyethylribose; note = thymine; note = backbone modification: 5'-phosphorothioate
  modified_base 16: mod_base = m5c; mod_base = OTHER; note = sugar modification: 2'-O-methoxyethylribose; note = backbone modification: 5'-phosphorothioate
  modified_base 17: mod_base = OTHER; note = sugar modification: 2'-O-methoxyethylribose; note = backbone modification: 5'-phosphorothioate; note = thymine
  modified_base 18: mod_base = OTHER; note = backbone modification: 5'-phosphorothioate; note = sugar modification: 2'-O-methoxyethylribose
  modified_base 19: mod_base = OTHER; note = backbone modification: 5'-phosphorothioate; note = sugar modification: 2'-O-methoxyethylribose
  modified_base 20: mod_base = OTHER; note = sugar modification: 2'-O-methoxyethylribose
ttcatcccactgattctgaa

SEQ ID NO: 791 - RNA, 22 nt, synthetic construct
  source 1..22: mol_type = other RNA; note = Antisense oligonucleotide
  modified_base 1: mod_base = m5c; mod_base = OTHER; note = backbone modification: 5'-phosphorothioate; note = sugar modification: 2'-O-methoxyethylribose
  modified_base 2: mod_base = OTHER; note = thymine; note = backbone modification: 5'-phosphorothioate; note = sugar modification: 2'-O-methoxyethylribose
  modified_base 3: mod_base = OTHER; note = thymine; note = backbone modification: 5'-phosphorothioate; note = sugar modification: 2'-O-methoxyethylribose
  modified_base 4: mod_base = OTHER; mod_base = m5c; note = backbone modification: 5'-phosphorothioate; note = sugar modification: 2'-O-methoxyethylribose
  modified_base 5: mod_base = OTHER; note = sugar modification: 2'-O-methoxyethylribose; note = backbone modification: 5'-phosphorothioate
  modified_base 6: mod_base = OTHER; note = sugar modification: 2'-O-methoxyethylribose; note = thymine; note = backbone modification: 5'-phosphorothioate
  modified_base 7: mod_base = OTHER; mod_base = m5c; note = sugar modification: 2'-O-methoxyethylribose; note = backbone modification: 5'-phosphorothioate
  modified_base 8: mod_base = m5c; mod_base = OTHER; note = backbone modification: 5'-phosphorothioate; note = sugar modification: 2'-O-methoxyethylribose
  modified_base 9: mod_base = OTHER; mod_base = m5c; note = backbone modification: 5'-phosphorothioate; note = sugar modification: 2'-O-methoxyethylribose
  modified_base 10: mod_base = OTHER; note = backbone modification: 5'-phosphorothioate; note = sugar modification: 2'-O-methoxyethylribose
  modified_base 11: mod_base = OTHER; mod_base = m5c; note = backbone modification: 5'-phosphorothioate; note = sugar modification: 2'-O-methoxyethylribose
  modified_base 12: mod_base = OTHER; note = thymine; note = backbone modification: 5'-phosphorothioate; note = sugar modification: 2'-O-methoxyethylribose
  modified_base 13: mod_base = OTHER; note = sugar modification: 2'-O-methoxyethylribose; note = backbone modification: 5'-phosphorothioate
  modified_base 14: mod_base = OTHER; note = sugar modification: 2'-O-methoxyethylribose; note = backbone modification: 5'-phosphorothioate
  modified_base 15: mod_base = OTHER; note = sugar modification: 2'-O-methoxyethylribose; note = thymine; note = backbone modification: 5'-phosphorothioate
  modified_base 16: mod_base = OTHER; note = backbone modification: 5'-phosphorothioate; note = thymine; note = sugar modification: 2'-O-methoxyethylribose
  modified_base 17: mod_base = m5c; mod_base = OTHER; note = backbone modification: 5'-phosphorothioate; note = sugar modification: 2'-O-methoxyethylribose
  modified_base 18: mod_base = OTHER; note = backbone modification: 5'-phosphorothioate; note = sugar modification: 2'-O-methoxyethylribose; note = thymine
  modified_base 19: mod_base = OTHER; note = backbone modification: 5'-phosphorothioate; note = sugar modification: 2'-O-methoxyethylribose
  modified_base 20: mod_base = OTHER; note = sugar modification: 2'-O-methoxyethylribose; note = backbone modification: 5'-phosphorothioate
  modified_base 21: mod_base = OTHER; note = backbone modification: 5'-phosphorothioate; note = sugar modification: 2'-O-methoxyethylribose
  modified_base 22: mod_base = OTHER; note = thymine; note = sugar modification: 2'-O-methoxyethylribose
cttcatcccactgattctgaat

SEQ ID NO: 792 - RNA, 14 nt, synthetic construct
  source 1..14: mol_type = other RNA; note = Antisense oligonucleotide
  modified_base 1: mod_base = OTHER; note = thymine; note = backbone modification: 5'-phosphorothioate; note = sugar modification: lna
  modified_base 2: mod_base = OTHER; mod_base = m5c; note = sugar modification: lna; note = backbone modification: 5'-phosphorothioate
  modified_base 3: mod_base = OTHER; note = backbone modification: 5'-phosphorothioate; note = sugar modification: 2'-O-methoxyethylribose
  modified_base 4: mod_base = OTHER; note = backbone modification: 5'-phosphorothioate; note = thymine; note = sugar modification: 2'-O-methoxyethylribose
  modified_base 5: mod_base = m5c; mod_base = OTHER; note = backbone modification: 5'-phosphorothioate; note = sugar modification: 2'-O-methoxyethylribose
  modified_base 6: mod_base = m5c; mod_base = OTHER; note = backbone modification: 5'-phosphorothioate; note = sugar modification: 2'-O-methoxyethylribose
  modified_base 7: mod_base = m5c; mod_base = OTHER; note = sugar modification: 2'-O-methoxyethylribose; note = backbone modification: 5'-phosphorothioate
  modified_base 8: mod_base = OTHER; note = backbone modification: 5'-phosphorothioate; note = sugar modification: 2'-O-methoxyethylribose
  modified_base 9: mod_base = OTHER; mod_base = m5c; note = sugar modification: 2'-O-methoxyethylribose; note = backbone modification: 5'-phosphorothioate
  modified_base 10: mod_base = OTHER; note = sugar modification: 2'-O-methoxyethylribose; note = backbone modification: 5'-phosphorothioate; note = thymine
  modified_base 11: mod_base = OTHER; note = backbone modification: 5'-phosphorothioate; note = sugar modification: 2'-O-methoxyethylribose
  modified_base 12: mod_base = OTHER; note = sugar modification: 2'-O-methoxyethylribose; note = backbone modification: 5'-phosphorothioate
  modified_base 13: mod_base = OTHER; note = sugar modification: lna; note = thymine; note = backbone modification: 5'-phosphorothioate
  modified_base 14: mod_base = OTHER; note = sugar modification: lna; note = thymine
tcatcccactgatt

SEQ ID NO: 793 - RNA, 16 nt, synthetic construct
  source 1..16: mol_type = other RNA; note = Antisense oligonucleotide
  modified_base 1: mod_base = OTHER; note = backbone modification: 5'-phosphorothioate; note = sugar modification: lna; note = thymine
  modified_base 2: mod_base = OTHER; mod_base = m5c; note = backbone modification: 5'-phosphorothioate; note = sugar modification: lna
  modified_base 3: mod_base = OTHER; note = backbone modification: 5'-phosphorothioate; note = sugar modification: 2'-O-methoxyethylribose
  modified_base 4: mod_base = OTHER; note = backbone modification: 5'-phosphorothioate; note = sugar modification: 2'-O-methoxyethylribose; note = thymine
  modified_base 5: mod_base = OTHER; mod_base = m5c; note = sugar modification: 2'-O-methoxyethylribose; note = backbone modification: 5'-phosphorothioate
  modified_base 6: mod_base = m5c; mod_base = OTHER; note = backbone modification: 5'-phosphorothioate; note = sugar modification: 2'-O-methoxyethylribose
  modified_base 7: mod_base = m5c; mod_base = OTHER; note = sugar modification: 2'-O-methoxyethylribose; note = backbone modification: 5'-phosphorothioate
  modified_base 8: mod_base = OTHER; note = sugar modification: 2'-O-methoxyethylribose; note = backbone modification: 5'-phosphorothioate
  modified_base 9: mod_base = m5c; mod_base = OTHER; note = sugar modification: 2'-O-methoxyethylribose; note = backbone modification: 5'-phosphorothioate
  modified_base 10: mod_base = OTHER; note = backbone modification: 5'-phosphorothioate; note = thymine; note = sugar modification: 2'-O-methoxyethylribose
  modified_base 11: mod_base = OTHER; note = sugar modification: 2'-O-methoxyethylribose; note = backbone modification: 5'-phosphorothioate
  modified_base 12: mod_base = OTHER; note = backbone modification: 5'-phosphorothioate; note = sugar modification: 2'-O-methoxyethylribose
  modified_base 13: mod_base = OTHER; note = backbone modification: 5'-phosphorothioate; note = sugar modification: 2'-O-methoxyethylribose; note = thymine
  modified_base 14: mod_base = OTHER; note = backbone modification: 5'-phosphorothioate; note = sugar modification: 2'-O-methoxyethylribose; note = thymine
  modified_base 15: mod_base = OTHER; mod_base = m5c; note = backbone modification: 5'-phosphorothioate; note = sugar modification: lna
  modified_base 16: mod_base = OTHER; note = thymine; note = sugar modification: lna
tcatcccactgattct

SEQ ID NO: 794 - RNA, 20 nt, synthetic construct
  source 1..20: mol_type = other RNA; note = Antisense oligonucleotide
  modified_base 1: mod_base = OTHER; note = thymine; note = backbone modification: 5'-phosphorothioate; note = sugar modification: lna
  modified_base 2: mod_base = m5c; mod_base = OTHER; note = backbone modification: 5'-phosphorothioate; note = sugar modification: lna
  modified_base 3: mod_base = OTHER; note = sugar modification: 2'-O-methoxyethylribose; note = backbone modification: 5'-phosphorothioate
  modified_base 4: mod_base = OTHER; note = backbone modification: 5'-phosphorothioate; note = thymine; note = sugar modification: 2'-O-methoxyethylribose
  modified_base 5: mod_base = OTHER; mod_base = m5c; note = sugar modification: 2'-O-methoxyethylribose; note = backbone modification: 5'-phosphorothioate
  modified_base 6: mod_base = m5c; mod_base = OTHER; note = sugar modification: 2'-O-methoxyethylribose; note = backbone modification: 5'-phosphorothioate
  modified_base 7: mod_base = m5c; mod_base = OTHER; note = sugar modification: 2'-O-methoxyethylribose; note = backbone modification: 5'-phosphorothioate
  modified_base 8: mod_base = OTHER; note = backbone modification: 5'-phosphorothioate; note = sugar modification: 2'-O-methoxyethylribose
  modified_base 9: mod_base = OTHER; mod_base = m5c; note = backbone modification: 5'-phosphorothioate; note = sugar modification: 2'-O-methoxyethylribose
  modified_base 10: mod_base = OTHER; note = sugar modification: 2'-O-methoxyethylribose; note = backbone modification: 5'-phosphorothioate; note = thymine
  modified_base 11: mod_base = OTHER; note = sugar modification: 2'-O-methoxyethylribose; note = backbone modification: 5'-phosphorothioate
  modified_base 12: mod_base = OTHER; note = sugar modification: 2'-O-methoxyethylribose; note = backbone modification: 5'-phosphorothioate
  modified_base 13: mod_base = OTHER; note = sugar modification: 2'-O-methoxyethylribose; note = thymine; note = backbone modification: 5'-phosphorothioate
  modified_base 14: mod_base = OTHER; note = backbone modification: 5'-phosphorothioate; note = thymine; note = sugar modification: 2'-O-methoxyethylribose
  modified_base 15: mod_base = m5c; mod_base = OTHER; note = sugar modification: 2'-O-methoxyethylribose; note = backbone modification: 5'-phosphorothioate
  modified_base 16: mod_base = OTHER; note = backbone modification: 5'-phosphorothioate; note = sugar modification: 2'-O-methoxyethylribose; note = thymine
  modified_base 17: mod_base = OTHER; note = sugar modification: 2'-O-methoxyethylribose; note = backbone modification: 5'-phosphorothioate
  modified_base 18: mod_base = OTHER; note = backbone modification: 5'-phosphorothioate; note = sugar modification: 2'-O-methoxyethylribose
  modified_base 19: mod_base = OTHER; note = backbone modification: 5'-phosphorothioate; note = sugar modification: lna
  modified_base 20: mod_base = OTHER; note = sugar modification: lna; note = thymine
tcatcccactgattctgaat

SEQ ID NO: 795 - RNA, 22 nt, synthetic construct
  source 1..22: mol_type = other RNA; note = Antisense oligonucleotide
  modified_base 1: mod_base = OTHER; note = sugar modification: lna; note = backbone modification: 5'-phosphorothioate; note = thymine
  modified_base 2: mod_base = OTHER; mod_base = m5c; note = backbone modification: 5'-phosphorothioate; note = sugar modification: lna
  modified_base 3: mod_base = OTHER; note = sugar modification: 2'-O-methoxyethylribose; note = backbone modification: 5'-phosphorothioate
  modified_base 4: mod_base = OTHER; note = backbone modification: 5'-phosphorothioate; note = sugar modification: 2'-O-methoxyethylribose; note = thymine
  modified_base 5: mod_base = OTHER; mod_base = m5c; note = sugar modification: 2'-O-methoxyethylribose; note = backbone modification: 5'-phosphorothioate
  modified_base 6: mod_base = OTHER; mod_base = m5c; note = sugar modification: 2'-O-methoxyethylribose; note = backbone modification: 5'-phosphorothioate
  modified_base 7: mod_base = OTHER; mod_base = m5c; note = backbone modification: 5'-phosphorothioate; note = sugar modification: 2'-O-methoxyethylribose
  modified_base 8: mod_base = OTHER; note = sugar modification: 2'-O-methoxyethylribose; note = backbone modification: 5'-phosphorothioate
  modified_base 9: mod_base = OTHER; mod_base = m5c; note = sugar modification: 2'-O-methoxyethylribose; note = backbone modification: 5'-phosphorothioate
  modified_base 10: mod_base = OTHER; note = backbone modification: 5'-phosphorothioate; note = thymine; note = sugar modification: 2'-O-methoxyethylribose
  modified_base 11: mod_base = OTHER; note = backbone modification: 5'-phosphorothioate; note = sugar modification: 2'-O-methoxyethylribose
  modified_base 12: mod_base = OTHER; note = sugar modification: 2'-O-methoxyethylribose; note = backbone modification: 5'-phosphorothioate
  modified_base 13: mod_base = OTHER; note = backbone modification: 5'-phosphorothioate; note = sugar modification: 2'-O-methoxyethylribose; note = thymine
  modified_base 14: mod_base = OTHER; note = sugar modification: 2'-O-methoxyethylribose; note = thymine; note = backbone modification: 5'-phosphorothioate
  modified_base 15: mod_base = m5c; mod_base = OTHER; note = sugar modification: 2'-O-methoxyethylribose; note = backbone modification: 5'-phosphorothioate
  modified_base 16: mod_base = OTHER; note = backbone modification: 5'-phosphorothioate; note = thymine; note = sugar modification: 2'-O-methoxyethylribose
  modified_base 17: mod_base = OTHER; note = sugar modification: 2'-O-methoxyethylribose; note = backbone modification: 5'-phosphorothioate
  modified_base 18: mod_base = OTHER; note = sugar modification: 2'-O-methoxyethylribose; note = backbone modification: 5'-phosphorothioate
  modified_base 19: mod_base = OTHER; note = backbone modification: 5'-phosphorothioate; note = sugar modification: 2'-O-methoxyethylribose
  modified_base 20: mod_base = OTHER; note = thymine; note = backbone modification: 5'-phosphorothioate; note = sugar modification: 2'-O-methoxyethylribose
  modified_base 21: mod_base = OTHER; note = thymine; note = backbone modification: 5'-phosphorothioate; note = sugar modification: lna
  modified_base 22: mod_base = OTHER; mod_base = m5c; note = sugar modification: lna
tcatcccactgattctgaattc

SEQ ID NO: 796 - RNA, 14 nt, synthetic construct
  source 1..14: mol_type = other RNA; note = Antisense oligonucleotide
  modified_base 1: mod_base = m5c; mod_base = OTHER; note = sugar modification: lna; note = backbone modification: 5'-phosphorothioate
  modified_base 2: mod_base = OTHER; mod_base = m5c; note = backbone modification: 5'-phosphorothioate; note = sugar modification: lna
  modified_base 3: mod_base = OTHER; mod_base = m5c; note = backbone modification: 5'-phosphorothioate; note = sugar modification: 2'-O-methoxyethylribose
  modified_base 4: mod_base = OTHER; note = sugar modification: 2'-O-methoxyethylribose; note = backbone modification: 5'-phosphorothioate
  modified_base 5: mod_base = m5c; mod_base = OTHER; note = sugar modification: 2'-O-methoxyethylribose; note = backbone modification: 5'-phosphorothioate
  modified_base 6: mod_base = OTHER; note = backbone modification: 5'-phosphorothioate; note = sugar modification: 2'-O-methoxyethylribose; note = thymine
  modified_base 7: mod_base = OTHER; note = sugar modification: 2'-O-methoxyethylribose; note = backbone modification: 5'-phosphorothioate
  modified_base 8: mod_base = OTHER; note = sugar modification: 2'-O-methoxyethylribose; note = backbone modification: 5'-phosphorothioate
  modified_base 9: mod_base = OTHER; note = thymine; note = sugar modification: 2'-O-methoxyethylribose; note = backbone modification: 5'-phosphorothioate
  modified_base 10: mod_base = OTHER; note = backbone modification: 5'-phosphorothioate; note = sugar modification: 2'-O-methoxyethylribose; note = thymine
  modified_base 11: mod_base = m5c; mod_base = OTHER; note = backbone modification: 5'-phosphorothioate; note = sugar modification: 2'-O-methoxyethylribose
  modified_base 12: mod_base = OTHER; note = backbone modification: 5'-phosphorothioate; note = sugar modification: 2'-O-methoxyethylribose; note = thymine
  modified_base 13: mod_base = OTHER; note = sugar modification: lna; note = backbone modification: 5'-phosphorothioate
  modified_base 14: mod_base = OTHER; note = sugar modification: lna
cccactgattctga

SEQ ID NO: 797 - RNA, 16 nt, synthetic construct
  source 1..16: mol_type = other RNA; note = Antisense oligonucleotide
  modified_base 1: mod_base = OTHER; note = backbone modification: 5'-phosphorothioate; note = sugar modification: lna
  modified_base 2: mod_base = OTHER; note = thymine; note = backbone modification: 5'-phosphorothioate; note = sugar modification: lna
  modified_base 3: mod_base = OTHER; mod_base = m5c; note = backbone modification: 5'-phosphorothioate; note = sugar modification: 2'-O-methoxyethylribose
  modified_base 4: mod_base = OTHER; mod_base = m5c; note = backbone modification: 5'-phosphorothioate; note = sugar modification: 2'-O-methoxyethylribose
  modified_base 5: mod_base = OTHER; mod_base = m5c; note = backbone modification: 5'-phosphorothioate; note = sugar modification: 2'-O-methoxyethylribose
  modified_base 6: mod_base = OTHER; note = sugar modification: 2'-O-methoxyethylribose; note = backbone modification: 5'-phosphorothioate
  modified_base 7: mod_base = OTHER; mod_base = m5c; note = backbone modification: 5'-phosphorothioate; note = sugar modification: 2'-O-methoxyethylribose
  modified_base 8: mod_base = OTHER; note = thymine; note = backbone modification: 5'-phosphorothioate; note = sugar modification: 2'-O-methoxyethylribose
  modified_base 9: mod_base = OTHER; note = sugar modification: 2'-O-methoxyethylribose; note = backbone modification: 5'-phosphorothioate
  modified_base 10: mod_base = OTHER; note = backbone modification: 5'-phosphorothioate; note = sugar modification: 2'-O-methoxyethylribose
  modified_base 11: mod_base = OTHER; note = thymine; note = backbone modification: 5'-phosphorothioate; note = sugar modification: 2'-O-methoxyethylribose
  modified_base 12: mod_base = OTHER; note = thymine; note = sugar modification: 2'-O-methoxyethylribose; note = backbone modification: 5'-phosphorothioate
  modified_base 13: mod_base = OTHER; mod_base = m5c; note = sugar modification: 2'-O-methoxyethylribose; note = backbone modification: 5'-phosphorothioate
  modified_base 14: mod_base = OTHER; note = backbone modification: 5'-phosphorothioate; note = sugar modification: 2'-O-methoxyethylribose; note = thymine
  modified_base 15: mod_base = OTHER; note = backbone modification: 5'-phosphorothioate; note = sugar modification: lna
  modified_base 16: mod_base = OTHER; note = sugar modification: lna
atcccactgattctga

SEQ ID NO: 798 - RNA, 20 nt, synthetic construct
  source 1..20: mol_type = other RNA; note = Antisense oligonucleotide
  modified_base 1: mod_base = m5c; mod_base = OTHER; note = sugar modification: lna; note = backbone modification: 5'-phosphorothioate
  modified_base 2: mod_base = OTHER; note = sugar modification: lna; note = thymine; note = backbone modification: 5'-phosphorothioate
  modified_base 3: mod_base = OTHER; note = sugar modification: 2'-O-methoxyethylribose; note = thymine; note = backbone modification: 5'-phosphorothioate
  modified_base 4: mod_base = OTHER; mod_base = m5c; note = sugar modification: 2'-O-methoxyethylribose; note = backbone modification: 5'-phosphorothioate
  modified_base 5: mod_base = OTHER; note = backbone modification: 5'-phosphorothioate; note = sugar modification: 2'-O-methoxyethylribose
  modified_base 6: mod_base = OTHER; note = backbone modification: 5'-phosphorothioate; note = sugar modification: 2'-O-methoxyethylribose; note = thymine
  modified_base 7: mod_base = OTHER; mod_base = m5c; note = sugar modification: 2'-O-methoxyethylribose; note = backbone modification: 5'-phosphorothioate
  modified_base 8: mod_base = OTHER; mod_base = m5c; note = backbone modification: 5'-phosphorothioate; note = sugar modification: 2'-O-methoxyethylribose
  modified_base 9: mod_base = OTHER; mod_base = m5c; note = sugar modification: 2'-O-methoxyethylribose; note = backbone modification: 5'-phosphorothioate
  modified_base 10: mod_base = OTHER; note = backbone modification: 5'-phosphorothioate; note = sugar modification: 2'-O-methoxyethylribose
  modified_base 11: mod_base = OTHER; mod_base = m5c; note = sugar modification: 2'-O-methoxyethylribose; note = backbone modification: 5'-phosphorothioate
  modified_base 12: mod_base = OTHER; note = thymine; note = sugar modification: 2'-O-methoxyethylribose; note = backbone modification: 5'-phosphorothioate
  modified_base 13: mod_base = OTHER; note = sugar modification: 2'-O-methoxyethylribose; note = backbone modification: 5'-phosphorothioate
  modified_base 14: mod_base = OTHER; note = backbone modification: 5'-phosphorothioate; note = sugar modification: 2'-O-methoxyethylribose
  modified_base 15: mod_base = OTHER; note = backbone modification: 5'-phosphorothioate; note = sugar modification: 2'-O-methoxyethylribose; note = thymine
  modified_base 16: mod_base = OTHER; note = thymine; note = backbone modification: 5'-phosphorothioate; note = sugar modification: 2'-O-methoxyethylribose
  modified_base 17: mod_base = m5c; mod_base = OTHER; note = sugar modification: 2'-O-methoxyethylribose; note = backbone modification: 5'-phosphorothioate
  modified_base 18: mod_base = OTHER; note = sugar modification: 2'-O-methoxyethylribose; note = backbone modification: 5'-phosphorothioate; note = thymine
  modified_base 19: mod_base = OTHER; note = sugar modification: lna; note = backbone modification: 5'-phosphorothioate
  modified_base 20: mod_base = OTHER; note = sugar modification: lna
cttcatcccactgattctga

SEQ ID NO: 799 - RNA, 22 nt, synthetic construct
  source 1..22: mol_type = other RNA; note = Antisense oligonucleotide
  modified_base 1: mod_base = OTHER; note = sugar modification: lna; note = backbone modification: 5'-phosphorothioate; note = thymine
  modified_base 2: mod_base = OTHER; note = backbone modification: 5'-phosphorothioate; note = sugar modification: lna
  modified_base 3: mod_base = m5c; mod_base = OTHER; note = sugar modification: 2'-O-methoxyethylribose; note = backbone modification: 5'-phosphorothioate
  modified_base 4: mod_base = OTHER; note = sugar modification: 2'-O-methoxyethylribose; note = thymine; note = backbone modification: 5'-phosphorothioate
  modified_base 5: mod_base = OTHER; note = thymine; note = backbone modification: 5'-phosphorothioate; note = sugar modification: 2'-O-methoxyethylribose
  modified_base 6: mod_base = m5c; mod_base = OTHER; note = sugar modification: 2'-O-methoxyethylribose; note = backbone modification: 5'-phosphorothioate
  modified_base 7: mod_base = OTHER; note = backbone modification: 5'-phosphorothioate; note = sugar modification: 2'-O-methoxyethylribose
  modified_base 8: mod_base = OTHER; note = backbone modification: 5'-phosphorothioate; note = thymine; note = sugar modification: 2'-O-methoxyethylribose
  modified_base 9: mod_base = m5c; mod_base = OTHER; note = sugar modification: 2'-O-methoxyethylribose; note = backbone modification: 5'-phosphorothioate
  modified_base 10: mod_base = OTHER; mod_base = m5c; note = backbone modification: 5'-phosphorothioate; note = sugar modification: 2'-O-methoxyethylribose
  modified_base 11: mod_base = OTHER; mod_base = m5c; note = sugar modification: 2'-O-methoxyethylribose; note = backbone modification: 5'-phosphorothioate
  modified_base 12: mod_base = OTHER; note = sugar modification: 2'-O-methoxyethylribose; note = backbone modification: 5'-phosphorothioate
  modified_base 13: mod_base = OTHER; mod_base = m5c; note = backbone modification: 5'-phosphorothioate; note = sugar modification: 2'-O-methoxyethylribose
  modified_base 14: mod_base = OTHER; note = sugar modification: 2'-O-methoxyethylribose; note = thymine; note = backbone modification: 5'-phosphorothioate
  modified_base 15: mod_base = OTHER; note = sugar modification: 2'-O-methoxyethylribose; note = backbone modification: 5'-phosphorothioate
  modified_base 16: mod_base = OTHER; note = backbone modification: 5'-phosphorothioate; note = sugar modification: 2'-O-methoxyethylribose
  modified_base 17: mod_base = OTHER; note = backbone modification: 5'-phosphorothioate; note = sugar modification: 2'-O-methoxyethylribose; note = thymine
  modified_base 18: mod_base = OTHER; note = thymine; note = sugar modification: 2'-O-methoxyethylribose; note = backbone modification: 5'-phosphorothioate
  modified_base 19: mod_base = m5c; mod_base = OTHER; note = backbone modification: 5'-phosphorothioate; note = sugar modification: 2'-O-methoxyethylribose
  modified_base 20: mod_base = OTHER; note = sugar modification: 2'-O-methoxyethylribose; note = backbone modification: 5'-phosphorothioate; note = thymine
  modified_base 21: mod_base = OTHER; note = sugar modification: lna; note = backbone modification: 5'-phosphorothioate
  modified_base 22: mod_base = OTHER; note = sugar modification: lna
tacttcatcccactgattctga

SEQ ID NO: 800 - RNA, 14 nt, synthetic construct
  source 1..14: mol_type = other RNA; note = Antisense oligonucleotide
  modified_base 1: mod_base = OTHER; note = sugar modification: lna; note = backbone modification: 5'-phosphorothioate
  modified_base 2: mod_base = OTHER; note = thymine; note = backbone modification: 5'-phosphorothioate; note = sugar modification: lna
  modified_base 3: mod_base = OTHER; mod_base = m5c; note = sugar modification: 2'-O-methoxyethylribose; note = backbone modification: 5'-phosphorothioate
  modified_base 4: mod_base = m5c; mod_base = OTHER; note = backbone modification: 5'-phosphorothioate; note = sugar modification: 2'-O-methoxyethylribose
  modified_base 5: mod_base = m5c; mod_base = OTHER; note = backbone modification: 5'-phosphorothioate; note = sugar modification: 2'-O-methoxyethylribose
  modified_base 6: mod_base = OTHER; note = backbone modification: 5'-phosphorothioate; note = sugar modification: 2'-O-methoxyethylribose
  modified_base 7: mod_base = OTHER; mod_base = m5c; note = backbone modification: 5'-phosphorothioate; note = sugar modification: 2'-O-methoxyethylribose
  modified_base 8: mod_base = OTHER; note = backbone modification: 5'-phosphorothioate; note = sugar modification: 2'-O-methoxyethylribose; note = thymine
  modified_base 9: mod_base = OTHER; note = backbone modification: 5'-phosphorothioate; note = sugar modification: 2'-O-methoxyethylribose
  modified_base 10: mod_base = OTHER; note = sugar modification: 2'-O-methoxyethylribose; note = backbone modification: 5'-phosphorothioate
  modified_base 11: mod_base = OTHER; note = backbone modification: 5'-phosphorothioate; note = sugar modification: 2'-O-methoxyethylribose; note = thymine
  modified_base 12: mod_base = OTHER; note = backbone modification: 5'-phosphorothioate; note = sugar modification: 2'-O-methoxyethylribose; note = thymine
  modified_base 13: mod_base = m5c; mod_base = OTHER; note = backbone modification: 5'-phosphorothioate; note = sugar modification: lna
  modified_base 14: mod_base = OTHER; note = sugar modification: lna; note = thymine
atcccactgattct

SEQ ID NO: 801 - RNA, 16 nt, synthetic construct
  source 1..16: mol_type = other RNA; note = Antisense oligonucleotide
  modified_base 1: mod_base = m5c; mod_base = OTHER; note = sugar modification: lna; note = backbone modification: 5'-phosphorothioate
  modified_base 2: mod_base = OTHER; note = sugar modification: lna; note = backbone modification: 5'-phosphorothioate
  modified_base 3: mod_base = OTHER; note = sugar modification: 2'-O-methoxyethylribose; note = thymine; note = backbone modification: 5'-phosphorothioate
  modified_base 4: mod_base = OTHER; mod_base = m5c; note = sugar modification: 2'-O-methoxyethylribose; note = backbone modification: 5'-phosphorothioate
  modified_base 5: mod_base = OTHER; mod_base = m5c; note = sugar modification: 2'-O-methoxyethylribose; note = backbone modification: 5'-phosphorothioate
  modified_base 6: mod_base = m5c; mod_base = OTHER; note = sugar modification: 2'-O-methoxyethylribose; note = backbone modification: 5'-phosphorothioate
  modified_base 7: mod_base = OTHER; note = sugar modification: 2'-O-methoxyethylribose; note = backbone modification: 5'-phosphorothioate
  modified_base 8: mod_base = OTHER; mod_base = m5c; note = sugar modification: 2'-O-methoxyethylribose; note = backbone modification: 5'-phosphorothioate
  modified_base 9: mod_base = OTHER; note = backbone modification: 5'-phosphorothioate; note = thymine; note = sugar modification: 2'-O-methoxyethylribose
  modified_base 10: mod_base = OTHER; note = sugar modification: 2'-O-methoxyethylribose; note = backbone modification: 5'-phosphorothioate
  modified_base 11: mod_base = OTHER; note = sugar modification: 2'-O-methoxyethylribose; note = backbone modification: 5'-phosphorothioate
  modified_base 12: mod_base = OTHER; note = sugar modification: 2'-O-methoxyethylribose; note = backbone modification: 5'-phosphorothioate; note = thymine
  modified_base 13: mod_base = OTHER; note = thymine; note = backbone modification: 5'-phosphorothioate; note = sugar modification: 2'-O-methoxyethylribose
  modified_base 14: mod_base = OTHER; mod_base = m5c; note = backbone modification: 5'-phosphorothioate; note = sugar modification: 2'-O-methoxyethylribose
  modified_base 15: mod_base = OTHER; note = thymine; note = sugar modification: lna; note = backbone modification: 5'-phosphorothioate
  modified_base 16: mod_base = OTHER; note = sugar modification: lna
catcccactgattctg

SEQ ID NO: 802 - RNA, 20 nt, synthetic construct
  source 1..20: mol_type = other RNA; note = Antisense oligonucleotide
  modified_base 1: mod_base = OTHER; note = backbone modification: 5'-phosphorothioate; note = thymine; note = sugar modification: lna
  modified_base 2: mod_base = OTHER; note = backbone modification: 5'-phosphorothioate; note = sugar modification: lna; note = thymine
  modified_base 3: mod_base = OTHER; mod_base = m5c; note = backbone modification: 5'-phosphorothioate; note = sugar modification: 2'-O-methoxyethylribose
  modified_base 4: mod_base = OTHER; note = sugar modification: 2'-O-methoxyethylribose; note = backbone modification: 5'-phosphorothioate
  modified_base 5: mod_base = OTHER; note = sugar modification: 2'-O-methoxyethylribose; note = thymine; note = backbone modification: 5'-phosphorothioate
  modified_base 6: mod_base = OTHER; mod_base = m5c; note = backbone modification: 5'-phosphorothioate; note = sugar modification: 2'-O-methoxyethylribose
  modified_base 7: mod_base = m5c; mod_base = OTHER; note = sugar modification: 2'-O-methoxyethylribose; note = backbone modification: 5'-phosphorothioate
  modified_base 8: mod_base = OTHER; mod_base = m5c; note = sugar modification: 2'-O-methoxyethylribose; note = backbone modification: 5'-phosphorothioate
  modified_base 9: mod_base = OTHER; note = backbone modification: 5'-phosphorothioate; note = sugar modification: 2'-O-methoxyethylribose
  modified_base 10: mod_base = m5c; mod_base = OTHER; note = sugar modification: 2'-O-methoxyethylribose; note = backbone modification: 5'-phosphorothioate
  modified_base 11: mod_base = OTHER; note = backbone modification: 5'-phosphorothioate; note = thymine; note = sugar modification: 2'-O-methoxyethylribose
  modified_base 12: mod_base = OTHER; note = sugar modification: 2'-O-methoxyethylribose; note = backbone modification: 5'-phosphorothioate
  modified_base 13: mod_base = OTHER; note = sugar modification: 2'-O-methoxyethylribose; note = backbone modification: 5'-phosphorothioate
  modified_base 14: mod_base = OTHER; note = thymine; note = backbone modification: 5'-phosphorothioate; note = sugar modification: 2'-O-methoxyethylribose
  modified_base 15: mod_base = OTHER; note = backbone modification: 5'-phosphorothioate; note = sugar modification: 2'-O-methoxyethylribose; note = thymine
  modified_base 16: mod_base = OTHER; mod_base = m5c; note = backbone modification: 5'-phosphorothioate; note = sugar modification: 2'-O-methoxyethylribose
  modified_base 17: mod_base = OTHER; note = thymine; note = sugar modification: 2'-O-methoxyethylribose; note = backbone modification: 5'-phosphorothioate
  modified_base 18: mod_base = OTHER; note = backbone modification: 5'-phosphorothioate; note = sugar modification: 2'-O-methoxyethylribose
  modified_base 19: mod_base = OTHER; note = backbone modification: 5'-phosphorothioate; note = sugar modification: lna
  modified_base 20: mod_base = OTHER; note = sugar modification: lna
ttcatcccactgattctgaa

SEQ ID NO: 803 - RNA, 22 nt, synthetic construct
  source 1..22: mol_type = other RNA; note = Antisense oligonucleotide
  modified_base 1: mod_base = m5c; mod_base = OTHER; note = sugar modification: lna; note = backbone modification: 5'-phosphorothioate
  modified_base 2: mod_base = OTHER; note = backbone modification: 5'-phosphorothioate; note = thymine; note = sugar modification: lna
  modified_base 3: mod_base = OTHER; note = backbone modification: 5'-phosphorothioate; note = thymine; note = sugar modification: 2'-O-methoxyethylribose
  modified_base 4: mod_base = OTHER; mod_base = m5c; note = backbone modification: 5'-phosphorothioate; note = sugar modification: 2'-O-methoxyethylribose
  modified_base 5: mod_base = OTHER; note = backbone modification: 5'-phosphorothioate; note = sugar modification: 2'-O-methoxyethylribose
  modified_base 6: mod_base = OTHER; note = thymine; note = sugar modification: 2'-O-methoxyethylribose; note = backbone modification: 5'-phosphorothioate
  modified_base 7: mod_base = m5c; mod_base = OTHER; note = sugar modification: 2'-O-methoxyethylribose; note = backbone modification: 5'-phosphorothioate
  modified_base 8: mod_base = m5c; mod_base = OTHER; note = backbone modification: 5'-phosphorothioate; note = sugar modification: 2'-O-methoxyethylribose
  modified_base 9: mod_base = OTHER; mod_base = m5c; note = sugar modification: 2'-O-methoxyethylribose; note = backbone modification: 5'-phosphorothioate
  modified_base 10: mod_base = OTHER; note = backbone modification: 5'-phosphorothioate; note = sugar modification: 2'-O-methoxyethylribose
  modified_base 11: mod_base = OTHER; mod_base = m5c; note = backbone modification: 5'-phosphorothioate; note = sugar modification: 2'-O-methoxyethylribose
  modified_base 12: mod_base = OTHER; note = thymine; note = sugar modification: 2'-O-methoxyethylribose; note = backbone modification: 5'-phosphorothioate
  modified_base 13: mod_base = OTHER; note = sugar modification: 2'-O-methoxyethylribose; note = backbone modification: 5'-phosphorothioate
  modified_base 14: mod_base = OTHER; note = backbone modification: 5'-phosphorothioate; note = sugar modification: 2'-O-methoxyethylribose
  modified_base 15: mod_base = OTHER; note = thymine; note = sugar modification: 2'-O-methoxyethylribose; note = backbone modification: 5'-phosphorothioate
  modified_base 16: mod_base = OTHER; note = thymine; note = backbone modification: 5'-phosphorothioate; note = sugar modification: 2'-O-methoxyethylribose
  modified_base 17: mod_base = m5c; mod_base = OTHER; note = backbone modification: 5'-phosphorothioate; note = sugar modification: 2'-O-methoxyethylribose
  modified_base 18: mod_base = OTHER; note = sugar modification: 2'-O-methoxyethylribose; note = thymine; note = backbone modification: 5'-phosphorothioate
  modified_base 19: mod_base = OTHER; note = sugar modification: 2'-O-methoxyethylribose; note = backbone modification: 5'-phosphorothioate
  modified_base 20: mod_base = OTHER; note = backbone modification: 5'-phosphorothioate; note = sugar modification: 2'-O-methoxyethylribose
  modified_base 21: mod_base = OTHER; note = backbone modification: 5'-phosphorothioate; note = sugar modification: lna
  modified_base 22: mod_base = OTHER; note = sugar modification: lna; note = thymine
cttcatcccactgattctgaat

SEQ ID NO: 804 - RNA, 18 nt, synthetic construct
  source 1..18: mol_type = other RNA; note = Antisense oligonucleotide
  modified_base 1: mod_base = OTHER; note = sugar modification: 2'-O-methoxyethylribose; note = backbone modification: 5'-phosphorothioate; note = thymine
  modified_base 2: mod_base = OTHER; mod_base = m5c; note = sugar modification: 2'-O-methoxyethylribose; note = backbone modification: 5'-phosphorothioate
  modified_base 3: mod_base = OTHER; note = sugar modification: 2'-O-methoxyethylribose; note = thymine; note = backbone modification: 5'-phosphorothioate
  modified_base 4: mod_base = OTHER; note = sugar modification: 2'-O-methoxyethylribose; note = thymine; note = backbone modification: 5'-phosphorothioate
  modified_base 5: mod_base = OTHER; note = sugar modification: 2'-O-methoxyethylribose; note = backbone modification: 5'-phosphorothioate; note = thymine
  modified_base 6: mod_base = OTHER; mod_base = m5c; note = sugar modification: 2'-O-methoxyethylribose; note = backbone modification: 5'-phosphorothioate
  modified_base 7: mod_base = OTHER; note = sugar modification: 2'-O-methoxyethylribose; note = backbone modification: 5'-phosphorothioate
  modified_base 8: mod_base = OTHER; note = backbone modification: 5'-phosphorothioate; note = sugar modification: 2'-O-methoxyethylribose
  modified_base 9: mod_base = m5c; mod_base = OTHER; note = backbone modification: 5'-phosphorothioate; note = sugar modification: 2'-O-methoxyethylribose
  modified_base 10: mod_base = OTHER; note = backbone modification: 5'-phosphorothioate; note = thymine; note = sugar modification: 2'-O-methoxyethylribose
  modified_base 11: mod_base = OTHER; note = sugar modification: 2'-O-methoxyethylribose; note = backbone modification: 5'-phosphorothioate
  modified_base 12: mod_base = OTHER; note = sugar modification: 2'-O-methoxyethylribose; note = backbone modification: 5'-phosphorothioate
  modified_base 13: mod_base = OTHER; note = backbone modification: 5'-phosphorothioate; note = sugar modification: 2'-O-methoxyethylribose
  modified_base 14: mod_base = OTHER; note = backbone modification: 5'-phosphorothioate; note = sugar modification: 2'-O-methoxyethylribose
  modified_base 15: mod_base = OTHER; note = thymine; note = backbone modification: 5'-phosphorothioate; note = sugar modification: 2'-O-methoxyethylribose
  modified_base 16: mod_base = OTHER; note = backbone modification: 5'-phosphorothioate; note = sugar modification: 2'-O-methoxyethylribose
  modified_base 17: mod_base = OTHER; note = backbone modification: 5'-phosphorothioate; note = sugar modification: 2'-O-methoxyethylribose
  modified_base 18: mod_base = OTHER; note = sugar modification: 2'-O-methoxyethylribose
tctttcaactagaataaa

SEQ ID NO: 805 - RNA, 18 nt, synthetic construct
  source 1..18: mol_type = other RNA; note = Antisense oligonucleotide
  modified_base 1: mod_base = OTHER; note = sugar modification: 2'-O-methoxyethylribose; note = thymine; note = backbone modification: 5'-phosphorothioate
  modified_base 2: mod_base = OTHER; note = sugar modification: 2'-O-methoxyethylribose; note = thymine; note = backbone modification: 5'-phosphorothioate
  modified_base 3: mod_base = m5c; mod_base = OTHER; note = sugar modification: 2'-O-methoxyethylribose; note = backbone modification: 5'-phosphorothioate
  modified_base 4: mod_base = OTHER; note = sugar modification: 2'-O-methoxyethylribose; note = thymine; note = backbone modification: 5'-phosphorothioate
  modified_base 5: mod_base = OTHER; note = sugar modification: 2'-O-methoxyethylribose; note = thymine; note = backbone modification: 5'-phosphorothioate
  modified_base 6: mod_base = OTHER; note = sugar modification: 2'-O-methoxyethylribose; note = backbone modification: 5'-phosphorothioate; note = thymine
  modified_base 7: mod_base = OTHER; mod_base = m5c; note = sugar modification: 2'-O-methoxyethylribose; note = backbone modification: 5'-phosphorothioate
  modified_base 8: mod_base = OTHER; note = sugar modification: 2'-O-methoxyethylribose; note = backbone modification: 5'-phosphorothioate
  modified_base 9: mod_base = OTHER; note = backbone modification: 5'-phosphorothioate; note = sugar modification: 2'-O-methoxyethylribose
  modified_base 10: mod_base = OTHER; mod_base = m5c; note = sugar modification: 2'-O-methoxyethylribose; note = backbone modification: 5'-phosphorothioate
  modified_base 11: mod_base = OTHER; note = backbone modification: 5'-phosphorothioate; note = thymine; note = sugar modification: 2'-O-methoxyethylribose
  modified_base 12: mod_base = OTHER; note = backbone modification: 5'-phosphorothioate; note = sugar modification: 2'-O-methoxyethylribose
  modified_base 13: mod_base = OTHER; note = backbone modification: 5'-phosphorothioate; note = sugar modification: 2'-O-methoxyethylribose
  modified_base 14: mod_base = OTHER; note = backbone modification: 5'-phosphorothioate; note = sugar modification: 2'-O-methoxyethylribose
  modified_base 15: mod_base = OTHER; note = backbone modification: 5'-phosphorothioate; note = sugar modification: 2'-O-methoxyethylribose
  modified_base 16: mod_base = OTHER; note = backbone modification: 5'-phosphorothioate; note = thymine; note = sugar modification: 2'-O-methoxyethylribose
  modified_base 17: mod_base = OTHER; note = sugar modification: 2'-O-methoxyethylribose; note = backbone modification: 5'-phosphorothioate
  modified_base 18: mod_base = OTHER; note = sugar modification: 2'-O-methoxyethylribose
ttctttcaactagaataa

SEQ ID NO: 806 - RNA, 18 nt, synthetic construct
  source 1..18: mol_type = other RNA; note = Antisense oligonucleotide
  modified_base 1: mod_base = OTHER; note = sugar modification: 2'-O-methoxyethylribose; note = backbone modification: 5'-phosphorothioate
  modified_base 2: mod_base = OTHER; note = thymine; note = sugar modification: 2'-O-methoxyethylribose; note = backbone modification: 5'-phosphorothioate
  modified_base 3: mod_base = OTHER; note = thymine; note = sugar modification: 2'-O-methoxyethylribose; note = backbone modification: 5'-phosphorothioate
  modified_base 4: mod_base = OTHER; mod_base = m5c; note = sugar modification: 2'-O-methoxyethylribose; note = backbone modification: 5'-phosphorothioate
  modified_base 5: mod_base = OTHER; note = thymine; note = sugar modification: 2'-O-methoxyethylribose; note = backbone modification: 5'-phosphorothioate
  modified_base 6: mod_base = OTHER; note = backbone modification: 5'-phosphorothioate; note = sugar modification: 2'-O-methoxyethylribose; note = thymine
  modified_base 7: mod_base = OTHER; note = backbone modification: 5'-phosphorothioate; note = sugar modification: 2'-O-methoxyethylribose; note = thymine
  modified_base 8: mod_base = OTHER; mod_base = m5c; note = sugar modification: 2'-O-methoxyethylribose; note = backbone modification: 5'-phosphorothioate
  modified_base 9: mod_base = OTHER; note = sugar modification: 2'-O-methoxyethylribose; note = backbone modification: 5'-phosphorothioate
  modified_base 10: mod_base = OTHER; note = sugar modification: 2'-O-methoxyethylribose; note = backbone modification: 5'-phosphorothioate
  modified_base 11: mod_base = m5c; mod_base = OTHER; note = sugar modification: 2'-O-methoxyethylribose; note = backbone modification: 5'-phosphorothioate
  modified_base 12: mod_base = OTHER; note = thymine; note = backbone modification: 5'-phosphorothioate; note = sugar modification: 2'-O-methoxyethylribose
  modified_base 13: mod_base = OTHER; note = backbone modification: 5'-phosphorothioate; note = sugar modification: 2'-O-methoxyethylribose
  modified_base 14: mod_base = OTHER; note = sugar modification: 2'-O-methoxyethylribose; note = backbone modification: 5'-phosphorothioate
  modified_base 15: mod_base = OTHER; note = backbone modification: 5'-phosphorothioate; note = sugar modification: 2'-O-methoxyethylribose
  modified_base 16: mod_base = OTHER; note = sugar modification: 2'-O-methoxyethylribose; note = backbone modification: 5'-phosphorothioate
  modified_base 17: mod_base = OTHER; note = sugar modification: 2'-O-methoxyethylribose; note = thymine; note = backbone modification: 5'-phosphorothioate
  modified_base 18: mod_base = OTHER; note = sugar modification: 2'-O-methoxyethylribose
attctttcaactagaata

SEQ ID NO: 807 - RNA, 18 nt, synthetic construct
  source 1..18: mol_type = other RNA; note = Antisense oligonucleotide
  modified_base 1: mod_base = OTHER; note = backbone modification: 5'-phosphorothioate; note = sugar modification: 2'-O-methoxyethylribose
  modified_base 2: mod_base = OTHER; note = sugar modification: 2'-O-methoxyethylribose; note = backbone modification: 5'-phosphorothioate
  modified_base 3: mod_base = OTHER; note = backbone modification: 5'-phosphorothioate; note = thymine; note = sugar modification: 2'-O-methoxyethylribose
  modified_base 4: mod_base = OTHER; note = backbone modification: 5'-phosphorothioate; note = thymine; note = sugar modification: 2'-O-methoxyethylribose
  modified_base 5: mod_base = OTHER; mod_base = m5c; note = sugar modification: 2'-O-methoxyethylribose; note = backbone modification: 5'-phosphorothioate
  modified_base 6: mod_base = OTHER; note = backbone modification: 5'-phosphorothioate; note = sugar modification: 2'-O-methoxyethylribose; note = thymine
  modified_base 7: mod_base = OTHER; note = sugar modification: 2'-O-methoxyethylribose; note = backbone modification: 5'-phosphorothioate; note = thymine
  modified_base 8: mod_base = OTHER; note = backbone modification: 5'-phosphorothioate; note = sugar modification: 2'-O-methoxyethylribose; note = thymine
  modified_base 9: mod_base = OTHER; mod_base = m5c; note = sugar modification: 2'-O-methoxyethylribose; note = backbone modification: 5'-phosphorothioate
  modified_base 10: mod_base = OTHER; note = backbone modification: 5'-phosphorothioate; note = sugar modification: 2'-O-methoxyethylribose
  modified_base 11: mod_base = OTHER; note = backbone modification: 5'-phosphorothioate; note = sugar modification: 2'-O-methoxyethylribose
  modified_base 12: mod_base = OTHER; mod_base = m5c; note = backbone modification: 5'-phosphorothioate; note = sugar modification: 2'-O-methoxyethylribose
  modified_base 13: mod_base = OTHER; note = thymine; note = sugar modification: 2'-O-methoxyethylribose; note = backbone modification: 5'-phosphorothioate
  modified_base 14: mod_base = OTHER; note = sugar modification: 2'-O-methoxyethylribose; note = backbone modification: 5'-phosphorothioate
  modified_base 15: mod_base = OTHER; note = sugar modification: 2'-O-methoxyethylribose; note = backbone modification: 5'-phosphorothioate
  modified_base 16: mod_base = OTHER; note = backbone modification: 5'-phosphorothioate; note = sugar modification: 2'-O-methoxyethylribose
  modified_base 17: mod_base = OTHER; note = sugar modification: 2'-O-methoxyethylribose; note = backbone modification: 5'-phosphorothioate
  modified_base 18: mod_base = OTHER; note = sugar modification: 2'-O-methoxyethylribose; note = thymine
aattctttcaactagaat

SEQ ID NO: 808 - RNA, 18 nt, synthetic construct
  source 1..18: mol_type = other RNA; note = Antisense oligonucleotide
  modified_base 1: mod_base = OTHER; note = sugar modification: 2'-O-methoxyethylribose; note = thymine; note = backbone modification: 5'-phosphorothioate
  modified_base 2: mod_base = OTHER; note = sugar modification: 2'-O-methoxyethylribose; note = backbone modification: 5'-phosphorothioate
  modified_base 3: mod_base = OTHER; note = sugar modification: 2'-O-methoxyethylribose; note = backbone modification: 5'-phosphorothioate
  modified_base 4: mod_base = OTHER; note = sugar modification: 2'-O-methoxyethylribose; note = backbone modification: 5'-phosphorothioate
  modified_base 5: mod_base = OTHER; note = sugar modification: 2'-O-methoxyethylribose; note = thymine; note = backbone modification: 5'-phosphorothioate
  modified_base 6: mod_base = OTHER; note = sugar modification: 2'-O-methoxyethylribose; note = backbone modification: 5'-phosphorothioate; note = thymine
  modified_base 7: mod_base = OTHER; mod_base = m5c; note = backbone modification: 5'-phosphorothioate; note = sugar modification: 2'-O-methoxyethylribose
  modified_base 8: mod_base = OTHER; note = thymine; note = sugar modification: 2'-O-methoxyethylribose; note = backbone modification: 5'-phosphorothioate
  modified_base 9: mod_base = OTHER; note = thymine; note = sugar modification: 2'-O-methoxyethylribose; note = backbone modification: 5'-phosphorothioate
  modified_base 10: mod_base = OTHER; note = sugar modification: 2'-O-methoxyethylribose; note = backbone modification: 5'-phosphorothioate; note = thymine
  modified_base 11: mod_base = m5c; mod_base = OTHER; note = sugar modification: 2'-O-methoxyethylribose; note = backbone modification: 5'-phosphorothioate
  modified_base 12: mod_base = OTHER; note = backbone modification: 5'-phosphorothioate; note = sugar modification: 2'-O-methoxyethylribose
  modified_base 13: mod_base = OTHER; note = sugar modification: 2'-O-methoxyethylribose; note = backbone modification: 5'-phosphorothioate
  modified_base 14: mod_base = OTHER; mod_base = m5c; note = sugar modification: 2'-O-methoxyethylribose; note = backbone modification: 5'-phosphorothioate
  modified_base 15: mod_base = OTHER; note = sugar modification: 2'-O-methoxyethylribose; note = backbone modification: 5'-phosphorothioate; note = thymine
  modified_base 16: mod_base = OTHER; note = backbone modification: 5'-phosphorothioate; note = sugar modification: 2'-O-methoxyethylribose
  modified_base 17: mod_base = OTHER; note = backbone modification: 5'-phosphorothioate; note = sugar modification: 2'-O-methoxyethylribose
  modified_base 18: mod_base = OTHER; note = sugar modification: 2'-O-methoxyethylribose
tgaattctttcaactaga

SEQ ID NO: 809 - RNA, 18 nt, synthetic construct
  source 1..18: mol_type = other RNA; note = Antisense oligonucleotide
  modified_base 1: mod_base = OTHER; mod_base = m5c; note = sugar modification: 2'-O-methoxyethylribose; note = backbone modification: 5'-phosphorothioate
  modified_base 2: mod_base = OTHER; note = thymine; note = backbone modification: 5'-phosphorothioate; note = sugar modification: 2'-O-methoxyethylribose
  modified_base 3: mod_base = OTHER; note = backbone modification: 5'-phosphorothioate; note = sugar modification: 2'-O-methoxyethylribose
  modified_base 4: mod_base = OTHER; note = backbone modification: 5'-phosphorothioate; note = sugar modification: 2'-O-methoxyethylribose
  modified_base 5: mod_base = OTHER; note = sugar modification: 2'-O-methoxyethylribose; note = backbone modification: 5'-phosphorothioate
  modified_base 6: mod_base = OTHER; note = backbone modification: 5'-phosphorothioate; note = thymine; note = sugar modification: 2'-O-methoxyethylribose
  modified_base 7: mod_base = OTHER; note = backbone modification: 5'-phosphorothioate; note = thymine; note = sugar modification: 2'-O-methoxyethylribose
  modified_base 8: mod_base = m5c; mod_base = OTHER; note = sugar modification: 2'-O-methoxyethylribose; note = backbone modification: 5'-phosphorothioate
  modified_base 9: mod_base = OTHER; note = sugar modification: 2'-O-methoxyethylribose; note = backbone modification: 5'-phosphorothioate; note = thymine
  modified_base 10: mod_base = OTHER; note = backbone modification: 5'-phosphorothioate; note = sugar modification: 2'-O-methoxyethylribose; note = thymine
  modified_base 11: mod_base = OTHER; note = sugar modification: 2'-O-methoxyethylribose; note = thymine; note = backbone modification: 5'-phosphorothioate
  modified_base 12: mod_base = OTHER; mod_base = m5c; note = sugar modification: 2'-O-methoxyethylribose; note = backbone modification: 5'-phosphorothioate
  modified_base 13: mod_base = OTHER; note = backbone modification: 5'-phosphorothioate; note = sugar modification: 2'-O-methoxyethylribose
  modified_base 14: mod_base = OTHER; note = sugar modification: 2'-O-methoxyethylribose; note = backbone modification: 5'-phosphorothioate
  modified_base 15: mod_base = m5c; mod_base = OTHER; note = sugar modification: 2'-O-methoxyethylribose; note = backbone modification: 5'-phosphorothioate
  modified_base 16: mod_base = OTHER; note = sugar modification: 2'-O-methoxyethylribose; note = thymine; note = backbone modification: 5'-phosphorothioate
  modified_base 17: mod_base = OTHER; note = sugar modification: 2'-O-methoxyethylribose; note = backbone modification: 5'-phosphorothioate
  modified_base 18: mod_base = OTHER; note = sugar modification: 2'-O-methoxyethylribose
ctgaattctttcaactag

SEQ ID NO: 810 - RNA, 18 nt, synthetic construct
  source 1..18: mol_type = other RNA; note = Antisense oligonucleotide
  modified_base 1: mod_base = OTHER; note = sugar modification: 2'-O-methoxyethylribose; note = thymine; note = backbone modification: 5'-phosphorothioate
  modified_base 2: mod_base = OTHER; mod_base = m5c; note = sugar modification: 2'-O-methoxyethylribose; note = backbone modification: 5'-phosphorothioate
  modified_base 3: mod_base = OTHER; note = sugar modification: 2'-O-methoxyethylribose; note = backbone modification: 5'-phosphorothioate; note = thymine
  modified_base 4: mod_base = OTHER; note = sugar modification: 2'-O-methoxyethylribose; note = backbone modification: 5'-phosphorothioate
  modified_base 5: mod_base = OTHER; note = backbone modification: 5'-phosphorothioate; note = sugar modification: 2'-O-methoxyethylribose
  modified_base 6: mod_base = OTHER; note = sugar modification: 2'-O-methoxyethylribose; note = backbone modification: 5'-phosphorothioate
  modified_base 7: mod_base = OTHER; note = thymine; note = sugar modification: 2'-O-methoxyethylribose; note = backbone modification: 5'-phosphorothioate
  modified_base 8: mod_base = OTHER; note = sugar modification: 2'-O-methoxyethylribose; note = backbone modification: 5'-phosphorothioate; note = thymine
  modified_base 9: mod_base = m5c; mod_base = OTHER; note = backbone modification: 5'-phosphorothioate; note = sugar modification: 2'-O-methoxyethylribose
  modified_base 10: mod_base = OTHER; note = backbone modification: 5'-phosphorothioate; note = sugar modification: 2'-O-methoxyethylribose; note = thymine
  modified_base 11: mod_base = OTHER; note = thymine; note = sugar modification: 2'-O-methoxyethylribose; note = backbone modification: 5'-phosphorothioate
  modified_base 12: mod_base = OTHER; note = sugar modification: 2'-O-methoxyethylribose; note = backbone modification: 5'-phosphorothioate; note = thymine
  modified_base 13: mod_base = OTHER; mod_base = m5c; note = backbone modification: 5'-phosphorothioate; note = sugar modification: 2'-O-methoxyethylribose
  modified_base 14: mod_base = OTHER; note = backbone modification: 5'-phosphorothioate; note = sugar modification: 2'-O-methoxyethylribose
  modified_base 15: mod_base = OTHER; note = backbone modification: 5'-phosphorothioate; note = sugar modification: 2'-O-methoxyethylribose
  modified_base 16: mod_base = m5c; mod_base = OTHER; note = sugar modification: 2'-O-methoxyethylribose; note = backbone modification: 5'-phosphorothioate
  modified_base 17: mod_base = OTHER; note = backbone modification: 5'-phosphorothioate; note = sugar modification: 2'-O-methoxyethylribose; note = thymine
  modified_base 18: mod_base = OTHER; note = sugar modification: 2'-O-methoxyethylribose
tctgaattctttcaacta

SEQ ID NO: 811 - RNA, 18 nt, synthetic construct
  source 1..18: mol_type = other RNA; note = Antisense oligonucleotide
  modified_base 1: mod_base = OTHER; note = thymine; note = backbone modification: 5'-phosphorothioate; note = sugar modification: 2'-O-methoxyethylribose
  modified_base 2: mod_base = OTHER; note = sugar modification: 2'-O-methoxyethylribose; note = thymine; note = backbone modification: 5'-phosphorothioate
  modified_base 3: mod_base = m5c; mod_base = OTHER; note = sugar modification: 2'-O-methoxyethylribose; note = backbone modification: 5'-phosphorothioate
  modified_base 4: mod_base = OTHER; note = backbone modification: 5'-phosphorothioate; note = sugar modification: 2'-O-methoxyethylribose; note = thymine
  modified_base 5: mod_base = OTHER; note = sugar modification: 2'-O-methoxyethylribose; note = backbone modification: 5'-phosphorothioate
  modified_base 6: mod_base = OTHER; note = sugar modification: 2'-O-methoxyethylribose; note = backbone modification: 5'-phosphorothioate
  modified_base 7: mod_base = OTHER; note = sugar modification: 2'-O-methoxyethylribose; note = backbone modification: 5'-phosphorothioate
  modified_base 8: mod_base = OTHER; note = thymine; note = sugar modification: 2'-O-methoxyethylribose; note = backbone modification: 5'-phosphorothioate
  modified_base 9: mod_base = OTHER; note = sugar modification: 2'-O-methoxyethylribose; note = thymine; note = backbone modification: 5'-phosphorothioate
  modified_base 10: mod_base = m5c; mod_base = OTHER; note = sugar modification: 2'-O-methoxyethylribose; note = backbone modification: 5'-phosphorothioate
  modified_base 11: mod_base = OTHER; note = backbone modification: 5'-phosphorothioate; note = sugar modification: 2'-O-methoxyethylribose; note = thymine
  modified_base 12: mod_base = OTHER; note = thymine; note = backbone modification: 5'-phosphorothioate; note = sugar modification: 2'-O-methoxyethylribose
  modified_base 13: mod_base = OTHER; note = thymine; note = sugar modification: 2'-O-methoxyethylribose; note = backbone modification: 5'-phosphorothioate
  modified_base 14: mod_base = OTHER; mod_base = m5c; note = sugar modification: 2'-O-methoxyethylribose; note = backbone modification: 5'-phosphorothioate
  modified_base 15: mod_base = OTHER; note = sugar modification: 2'-O-methoxyethylribose; note = backbone modification: 5'-phosphorothioate
  modified_base 16: mod_base = OTHER; note = backbone modification: 5'-phosphorothioate; note = sugar modification: 2'-O-methoxyethylribose
  modified_base 17: mod_base = m5c; mod_base = OTHER; note = sugar modification: 2'-O-methoxyethylribose; note = backbone modification: 5'-phosphorothioate
  modified_base 18: mod_base = OTHER; note = sugar modification: 2'-O-methoxyethylribose; note = thymine
ttctgaattctttcaact

SEQ ID NO: 812 - RNA, 18 nt, synthetic construct
  source 1..18: mol_type = other RNA; note = Antisense oligonucleotide
  modified_base 1: mod_base = OTHER; note = backbone modification: 5'-phosphorothioate; note = sugar modification: 2'-O-methoxyethylribose
  modified_base 2: mod_base = OTHER; note = backbone modification: 5'-phosphorothioate; note = sugar modification: 2'-O-methoxyethylribose
  modified_base 3: mod_base = OTHER; note = backbone modification: 5'-phosphorothioate; note = sugar modification: 2'-O-methoxyethylribose; note = thymine
  modified_base 4: mod_base = OTHER; note = backbone modification: 5'-phosphorothioate; note = thymine; note = sugar modification: 2'-O-methoxyethylribose
  modified_base 5: mod_base = OTHER; mod_base = m5c; note = sugar modification: 2'-O-methoxyethylribose; note = backbone modification: 5'-phosphorothioate
  modified_base 6: mod_base = OTHER; note = backbone modification: 5'-phosphorothioate; note = sugar modification: 2'-O-methoxyethylribose; note = thymine
  modified_base 7: mod_base = OTHER; note = sugar modification: 2'-O-methoxyethylribose; note = backbone modification: 5'-phosphorothioate
  modified_base 8: mod_base = OTHER; note = backbone modification: 5'-phosphorothioate; note = sugar modification: 2'-O-methoxyethylribose
  modified_base 9: mod_base = OTHER; note = backbone modification: 5'-phosphorothioate; note = sugar modification: 2'-O-methoxyethylribose
  modified_base 10: mod_base = OTHER; note = thymine; note = sugar modification: 2'-O-methoxyethylribose; note = backbone modification: 5'-phosphorothioate
  modified_base 11: mod_base = OTHER; note = thymine; note = sugar modification: 2'-O-methoxyethylribose; note = backbone modification: 5'-phosphorothioate
  modified_base 12: mod_base = OTHER; mod_base = m5c; note = sugar modification: 2'-O-methoxyethylribose; note = backbone modification: 5'-phosphorothioate
  modified_base 13: mod_base = OTHER; note = thymine; note = backbone modification: 5'-phosphorothioate; note = sugar modification: 2'-O-methoxyethylribose
  modified_base 14: mod_base = OTHER; note = thymine; note = sugar modification: 2'-O-methoxyethylribose; note = backbone modification: 5'-phosphorothioate
  modified_base 15: mod_base = OTHER; note = backbone modification: 5'-phosphorothioate; note = thymine; note = sugar modification: 2'-O-methoxyethylribose
  modified_base 16: mod_base = OTHER; mod_base = m5c; note = sugar modification: 2'-O-methoxyethylribose; note = backbone modification: 5'-phosphorothioate
  modified_base 17: mod_base = OTHER; note = backbone modification: 5'-phosphorothioate; note = sugar modification: 2'-O-methoxyethylribose
  modified_base 18: mod_base = OTHER; note = sugar modification: 2'-O-methoxyethylribose
gattctgaattctttcaa

SEQ ID NO: 813 - RNA, 18 nt, synthetic construct
  source 1..18: mol_type = other RNA; note = Antisense oligonucleotide
  modified_base 1: mod_base = OTHER; note = backbone modification: 5'-phosphorothioate; note = thymine; note = sugar modification: 2'-O-methoxyethylribose
  modified_base 2: mod_base = OTHER; note = sugar modification: 2'-O-methoxyethylribose; note = backbone modification: 5'-phosphorothioate
  modified_base 3: mod_base = OTHER; note = sugar modification: 2'-O-methoxyethylribose; note = backbone modification: 5'-phosphorothioate
  modified_base 4: mod_base = OTHER; note = backbone modification: 5'-phosphorothioate; note = sugar modification: 2'-O-methoxyethylribose; note = thymine
  modified_base 5: mod_base = OTHER; note = thymine; note = backbone modification: 5'-phosphorothioate; note = sugar modification: 2'-O-methoxyethylribose
  modified_base 6: mod_base = OTHER; mod_base = m5c; note = backbone modification: 5'-phosphorothioate; note = sugar modification: 2'-O-methoxyethylribose
  modified_base 7: mod_base = OTHER; note = thymine; note = sugar modification: 2'-O-methoxyethylribose; note = backbone modification: 5'-phosphorothioate
  modified_base 8: mod_base = OTHER; note = sugar modification: 2'-O-methoxyethylribose; note = backbone modification: 5'-phosphorothioate
  modified_base 9: mod_base = OTHER; note = backbone modification: 5'-phosphorothioate; note = sugar modification: 2'-O-methoxyethylribose
  modified_base 10: mod_base = OTHER; note = backbone modification: 5'-phosphorothioate; note = sugar modification: 2'-O-methoxyethylribose
  modified_base 11: mod_base = OTHER; note = sugar modification: 2'-O-methoxyethylribose; note = thymine; note = backbone modification: 5'-phosphorothioate
  modified_base 12: mod_base = OTHER; note = backbone modification: 5'-phosphorothioate; note = thymine; note = sugar modification: 2'-O-methoxyethylribose
  modified_base 13: mod_base = m5c; mod_base = OTHER; note = backbone modification: 5'-phosphorothioate; note = sugar modification: 2'-O-methoxyethylribose
  modified_base 14: mod_base = OTHER; note = backbone modification: 5'-phosphorothioate; note = thymine; note = sugar modification: 2'-O-methoxyethylribose
  modified_base 15: mod_base = OTHER; note = sugar modification: 2'-O-methoxyethylribose; note = thymine; note = backbone modification: 5'-phosphorothioate
  modified_base 16: mod_base = OTHER; note = sugar modification: 2'-O-methoxyethylribose; note = backbone modification: 5'-phosphorothioate; note = thymine
  modified_base 17: mod_base = m5c; mod_base = OTHER; note = sugar modification: 2'-O-methoxyethylribose; note = backbone modification: 5'-phosphorothioate
  modified_base 18: mod_base = OTHER; note = sugar modification: 2'-O-methoxyethylribose
tgattctgaattctttca

SEQ ID NO: 814 - RNA, 18 nt, synthetic construct
  source 1..18: mol_type = other RNA; note = Antisense oligonucleotide
  modified_base 1: mod_base = OTHER; mod_base = m5c; note = sugar modification: 2'-O-methoxyethylribose; note = backbone modification: 5'-phosphorothioate
  modified_base 2: mod_base = OTHER; note = thymine; note = backbone modification: 5'-phosphorothioate; note = sugar modification: 2'-O-methoxyethylribose
  modified_base 3: mod_base = OTHER; note = backbone modification: 5'-phosphorothioate; note = sugar modification: 2'-O-methoxyethylribose
  modified_base 4: mod_base = OTHER; note = sugar modification: 2'-O-methoxyethylribose; note = backbone modification: 5'-phosphorothioate
  modified_base 5: mod_base = OTHER; note = thymine; note = backbone modification: 5'-phosphorothioate; note = sugar modification: 2'-O-methoxyethylribose
  modified_base 6: mod_base = OTHER; note = sugar modification: 2'-O-methoxyethylribose; note = thymine; note = backbone modification: 5'-phosphorothioate
  modified_base 7: mod_base = OTHER; mod_base = m5c; note = sugar modification: 2'-O-methoxyethylribose; note = backbone modification: 5'-phosphorothioate
  modified_base 8: mod_base = OTHER; note = sugar modification: 2'-O-methoxyethylribose; note = backbone modification: 5'-phosphorothioate; note = thymine
  modified_base 9: mod_base = OTHER; note = sugar modification: 2'-O-methoxyethylribose; note = backbone modification: 5'-phosphorothioate
  modified_base 10: mod_base = OTHER; note = backbone modification: 5'-phosphorothioate; note = sugar modification: 2'-O-methoxyethylribose
  modified_base 11: mod_base = OTHER; note = sugar modification: 2'-O-methoxyethylribose; note = backbone modification: 5'-phosphorothioate
  modified_base 12: mod_base = OTHER; note = backbone modification: 5'-phosphorothioate; note = thymine; note = sugar modification: 2'-O-methoxyethylribose
  modified_base 13: mod_base = OTHER; note = backbone modification: 5'-phosphorothioate; note = thymine; note = sugar modification: 2'-O-methoxyethylribose
  modified_base 14: mod_base = m5c; mod_base = OTHER; note = backbone modification: 5'-phosphorothioate; note = sugar modification: 2'-O-methoxyethylribose
  modified_base 15: mod_base = OTHER; note = backbone modification: 5'-phosphorothioate; note = thymine; note = sugar modification: 2'-O-methoxyethylribose
  modified_base 16: mod_base = OTHER; note = thymine; note = sugar modification: 2'-O-methoxyethylribose; note = backbone modification: 5'-phosphorothioate
  modified_base 17: mod_base = OTHER; note = backbone modification: 5'-phosphorothioate; note = sugar modification: 2'-O-methoxyethylribose; note = thymine
  modified_base 18: mod_base = OTHER; mod_base = m5c; note = sugar modification: 2'-O-methoxyethylribose
ctgattctgaattctttc

SEQ ID NO: 815 - RNA, 18 nt, synthetic construct
  source 1..18: mol_type = other RNA; note = Antisense oligonucleotide
  modified_base 1: mod_base = OTHER; note = sugar modification: 2'-O-methoxyethylribose; note = backbone modification: 5'-phosphorothioate
  modified_base 2: mod_base = OTHER; mod_base = m5c; note = backbone modification: 5'-phosphorothioate; note = sugar modification: 2'-O-methoxyethylribose
  modified_base 3: mod_base = OTHER; note = thymine; note = sugar modification: 2'-O-methoxyethylribose; note = backbone modification: 5'-phosphorothioate
  modified_base 4: mod_base = OTHER; note = backbone modification: 5'-phosphorothioate; note = sugar modification: 2'-O-methoxyethylribose
  modified_base 5: mod_base = OTHER; note = backbone modification: 5'-phosphorothioate; note = sugar modification: 2'-O-methoxyethylribose
  modified_base 6: mod_base = OTHER; note = sugar modification: 2'-O-methoxyethylribose; note = backbone modification: 5'-phosphorothioate; note = thymine
  modified_base 7: mod_base = OTHER; note = thymine; note = backbone modification: 5'-phosphorothioate; note = sugar modification: 2'-O-methoxyethylribose
  modified_base 8: mod_base = OTHER; mod_base = m5c; note = sugar modification: 2'-O-methoxyethylribose; note = backbone modification: 5'-phosphorothioate
  modified_base 9: mod_base = OTHER; note = backbone modification: 5'-phosphorothioate; note = sugar modification: 2'-O-methoxyethylribose; note = thymine
  modified_base 10: mod_base = OTHER; note = backbone modification: 5'-phosphorothioate; note = sugar modification: 2'-O-methoxyethylribose
  modified_base 11: mod_base = OTHER; note = sugar modification: 2'-O-methoxyethylribose; note = backbone modification: 5'-phosphorothioate
  modified_base 12: mod_base = OTHER; note = backbone modification: 5'-phosphorothioate; note = sugar modification: 2'-O-methoxyethylribose
  modified_base 13: mod_base = OTHER; note = sugar modification: 2'-O-methoxyethylribose; note = backbone modification: 5'-phosphorothioate; note = thymine
  modified_base 14: mod_base = OTHER; note = backbone modification: 5'-phosphorothioate; note = thymine; note = sugar modification: 2'-O-methoxyethylribose
  modified_base 15: mod_base = m5c; mod_base = OTHER; note = sugar modification: 2'-O-methoxyethylribose; note = backbone modification: 5'-phosphorothioate
  modified_base 16: mod_base = OTHER; note = backbone modification: 5'-phosphorothioate; note = thymine; note = sugar modification: 2'-O-methoxyethylribose
  modified_base 17: mod_base = OTHER; note = thymine; note = backbone modification: 5'-phosphorothioate; note = sugar modification: 2'-O-methoxyethylribose
  modified_base 18: mod_base = OTHER; note = sugar modification: 2'-O-methoxyethylribose; note = thymine
actgattctgaattcttt

SEQ ID NO: 816 - RNA, 18 nt, synthetic construct
  source 1..18: mol_type = other RNA; note = Antisense oligonucleotide
  modified_base 1: mod_base = OTHER; mod_base = m5c; note = backbone modification: 5'-phosphorothioate; note = sugar modification: 2'-O-methoxyethylribose
  modified_base 2: mod_base = OTHER; mod_base = m5c; note = backbone modification: 5'-phosphorothioate; note = sugar modification: 2'-O-methoxyethylribose
  modified_base 3: mod_base = OTHER; note = backbone modification: 5'-phosphorothioate; note = sugar modification: 2'-O-methoxyethylribose
  modified_base 4: mod_base = m5c; mod_base = OTHER; note = backbone modification: 5'-phosphorothioate; note = sugar modification: 2'-O-methoxyethylribose
  modified_base 5: mod_base = OTHER; note = sugar modification: 2'-O-methoxyethylribose; note = thymine; note = backbone modification: 5'-phosphorothioate
  modified_base 6: mod_base = OTHER; note = backbone modification: 5'-phosphorothioate; note = sugar modification: 2'-O-methoxyethylribose
  modified_base 7: mod_base = OTHER; note = sugar modification: 2'-O-methoxyethylribose; note = backbone modification: 5'-phosphorothioate
  modified_base 8: mod_base = OTHER; note = thymine; note = sugar modification: 2'-O-methoxyethylribose; note = backbone modification: 5'-phosphorothioate
  modified_base 9: mod_base = OTHER; note = sugar modification: 2'-O-methoxyethylribose; note = backbone modification: 5'-phosphorothioate; note = thymine
  modified_base 10: mod_base = m5c; mod_base = OTHER; note = sugar modification: 2'-O-methoxyethylribose; note = backbone modification: 5'-phosphorothioate
  modified_base 11: mod_base = OTHER; note = thymine; note = sugar modification: 2'-O-methoxyethylribose; note = backbone modification: 5'-phosphorothioate
  modified_base 12: mod_base = OTHER; note = backbone modification: 5'-phosphorothioate; note = sugar modification: 2'-O-methoxyethylribose
  modified_base 13: mod_base = OTHER; note = backbone modification: 5'-phosphorothioate; note = sugar modification: 2'-O-methoxyethylribose
  modified_base 14: mod_base = OTHER; note = sugar modification: 2'-O-methoxyethylribose; note = backbone modification: 5'-phosphorothioate
  modified_base 15: mod_base = OTHER; note = backbone modification: 5'-phosphorothioate; note = thymine; note = sugar modification: 2'-O-methoxyethylribose
  modified_base 16: mod_base = OTHER; note = sugar modification: 2'-O-methoxyethylribose; note = backbone modification: 5'-phosphorothioate; note = thymine
  modified_base 17: mod_base = OTHER; mod_base = m5c; note = backbone modification: 5'-phosphorothioate; note = sugar modification: 2'-O-methoxyethylribose
  modified_base 18: mod_base = OTHER; note = sugar modification: 2'-O-methoxyethylribose; note = thymine
ccactgattctgaattct

SEQ ID NO: 817 - RNA, 18 nt, synthetic construct
  source 1..18: mol_type = other RNA; note = Antisense oligonucleotide
  modified_base 1: mod_base = m5c; mod_base = OTHER; note = backbone modification: 5'-phosphorothioate; note = sugar modification: 2'-O-methoxyethylribose
  modified_base 2: mod_base = OTHER; mod_base = m5c; note = sugar modification: 2'-O-methoxyethylribose; note = backbone modification: 5'-phosphorothioate
  modified_base 3: mod_base = OTHER; mod_base = m5c; note = sugar modification: 2'-O-methoxyethylribose; note = backbone modification: 5'-phosphorothioate
  modified_base 4: mod_base = OTHER; note = sugar modification: 2'-O-methoxyethylribose; note = backbone modification: 5'-phosphorothioate
  modified_base 5: mod_base = OTHER; mod_base = m5c; note = backbone modification: 5'-phosphorothioate; note = sugar modification: 2'-O-methoxyethylribose
  modified_base 6: mod_base = OTHER; note = thymine; note = sugar modification: 2'-O-methoxyethylribose; note = backbone modification: 5'-phosphorothioate
  modified_base 7: mod_base = OTHER; note = sugar modification: 2'-O-methoxyethylribose; note = backbone modification: 5'-phosphorothioate
  modified_base 8: mod_base = OTHER; note = backbone modification: 5'-phosphorothioate; note = sugar modification: 2'-O-methoxyethylribose
  modified_base 9: mod_base = OTHER; note = backbone modification: 5'-phosphorothioate; note = sugar modification: 2'-O-methoxyethylribose; note = thymine
  modified_base 10: mod_base = OTHER; note = thymine; note = backbone modification: 5'-phosphorothioate; note = sugar modification: 2'-O-methoxyethylribose
  modified_base 11: mod_base = m5c; mod_base = OTHER; note = sugar modification: 2'-O-methoxyethylribose; note = backbone modification: 5'-phosphorothioate
  modified_base 12: mod_base = OTHER; note = backbone modification: 5'-phosphorothioate; note = thymine; note = sugar modification: 2'-O-methoxyethylribose
  modified_base 13: mod_base = OTHER; note = sugar modification: 2'-O-methoxyethylribose; note = backbone modification: 5'-phosphorothioate
  modified_base 14: mod_base = OTHER; note = backbone modification: 5'-phosphorothioate; note = sugar modification: 2'-O-methoxyethylribose
  modified_base 15: mod_base = OTHER; note = sugar modification: 2'-O-methoxyethylribose; note = backbone modification: 5'-phosphorothioate
  modified_base 16: mod_base = OTHER; note = backbone modification: 5'-phosphorothioate; note = thymine; note = sugar modification: 2'-O-methoxyethylribose
  modified_base 17: mod_base = OTHER; note = backbone modification: 5'-phosphorothioate; note = thymine; note = sugar modification: 2'-O-methoxyethylribose
  modified_base 18: mod_base = m5c; mod_base = OTHER; note = sugar modification: 2'-O-methoxyethylribose
cccactgattctgaattc

SEQ ID NO: 818 - RNA, 18 nt, synthetic construct
  source 1..18: mol_type = other RNA; note = Antisense oligonucleotide
  modified_base 1: mod_base = OTHER; note = backbone modification: 5'-phosphorothioate; note = sugar modification: 2'-O-methoxyethylribose; note = thymine
  modified_base 2: mod_base = m5c; mod_base = OTHER; note = sugar modification: 2'-O-methoxyethylribose; note = backbone modification: 5'-phosphorothioate
  modified_base 3: mod_base = m5c; mod_base = OTHER; note = sugar modification: 2'-O-methoxyethylribose; note = backbone modification: 5'-phosphorothioate
  modified_base 4: mod_base = OTHER; mod_base = m5c; note = backbone modification: 5'-phosphorothioate; note = sugar modification: 2'-O-methoxyethylribose
  modified_base 5: mod_base = OTHER; note = sugar modification: 2'-O-methoxyethylribose; note = backbone modification: 5'-phosphorothioate
  modified_base 6: mod_base = OTHER; mod_base = m5c; note = backbone modification: 5'-phosphorothioate; note = sugar modification: 2'-O-methoxyethylribose
  modified_base 7: mod_base = OTHER; note = thymine; note = backbone modification: 5'-phosphorothioate; note = sugar modification: 2'-O-methoxyethylribose
  modified_base 8: mod_base = OTHER; note = backbone modification: 5'-phosphorothioate; note = sugar modification: 2'-O-methoxyethylribose
  modified_base 9: mod_base = OTHER; note = sugar modification: 2'-O-methoxyethylribose; note = backbone modification: 5'-phosphorothioate
  modified_base 10: mod_base = OTHER; note = sugar modification: 2'-O-methoxyethylribose; note = thymine; note = backbone modification: 5'-phosphorothioate
  modified_base 11: mod_base = OTHER; note = thymine; note = backbone modification: 5'-phosphorothioate; note = sugar modification: 2'-O-methoxyethylribose
  modified_base 12: mod_base = m5c; mod_base = OTHER; note = sugar modification: 2'-O-methoxyethylribose; note = backbone modification: 5'-phosphorothioate
  modified_base 13: mod_base = OTHER; note = thymine; note = backbone modification: 5'-phosphorothioate; note = sugar modification: 2'-O-methoxyethylribose
  modified_base 14: mod_base = OTHER; note = sugar modification: 2'-O-methoxyethylribose; note = backbone modification: 5'-phosphorothioate
  modified_base 15: mod_base = OTHER; note = sugar modification: 2'-O-methoxyethylribose; note = backbone modification: 5'-phosphorothioate
  modified_base 16: mod_base = OTHER; note = backbone modification: 5'-phosphorothioate; note = sugar modification: 2'-O-methoxyethylribose
  modified_base 17: mod_base = OTHER; note = backbone modification: 5'-phosphorothioate; note = sugar modification: 2'-O-methoxyethylribose; note = thymine
  modified_base 18: mod_base = OTHER; note = sugar modification: 2'-O-methoxyethylribose; note = thymine
tcccactgattctgaatt

SEQ ID NO: 819 - RNA, 18 nt, synthetic construct
  source 1..18: mol_type = other RNA; note = Antisense oligonucleotide
  modified_base 1: mod_base = OTHER; note = backbone modification: 5'-phosphorothioate; note = sugar modification: 2'-O-methoxyethylribose
  modified_base 2: mod_base = OTHER; note = thymine; note = backbone modification: 5'-phosphorothioate; note = sugar modification: 2'-O-methoxyethylribose
  modified_base 3: mod_base = OTHER; mod_base = m5c; note = sugar modification: 2'-O-methoxyethylribose; note = backbone modification: 5'-phosphorothioate
  modified_base 4: mod_base = OTHER; mod_base = m5c; note = sugar modification: 2'-O-methoxyethylribose; note = backbone modification: 5'-phosphorothioate
  modified_base 5: mod_base = m5c; mod_base = OTHER; note = sugar modification: 2'-O-methoxyethylribose; note = backbone modification: 5'-phosphorothioate
  modified_base 6: mod_base = OTHER; note = backbone modification: 5'-phosphorothioate; note = sugar modification: 2'-O-methoxyethylribose
  modified_base 7: mod_base = OTHER; mod_base = m5c; note = sugar modification: 2'-O-methoxyethylribose; note = backbone modification: 5'-phosphorothioate
  modified_base 8: mod_base = OTHER; note = thymine; note = backbone modification: 5'-phosphorothioate; note = sugar modification: 2'-O-methoxyethylribose
  modified_base 9: mod_base = OTHER; note = backbone modification: 5'-phosphorothioate; note = sugar modification: 2'-O-methoxyethylribose
  modified_base 10: mod_base = OTHER; note = backbone modification: 5'-phosphorothioate; note = sugar modification: 2'-O-methoxyethylribose
  modified_base 11: mod_base = OTHER; note = backbone modification: 5'-phosphorothioate; note = thymine; note = sugar modification: 2'-O-methoxyethylribose
  modified_base 12: mod_base = OTHER; note = sugar modification: 2'-O-methoxyethylribose; note = backbone modification: 5'-phosphorothioate; note = thymine
  modified_base 13: mod_base = m5c; mod_base = OTHER; note = backbone modification: 5'-phosphorothioate; note = sugar modification: 2'-O-methoxyethylribose
  modified_base 14: mod_base = OTHER; note = sugar modification: 2'-O-methoxyethylribose; note = backbone modification: 5'-phosphorothioate; note = thymine
  modified_base 15: mod_base = OTHER; note = backbone modification: 5'-phosphorothioate; note = sugar modification: 2'-O-methoxyethylribose
  modified_base 16: mod_base = OTHER; note = backbone modification: 5'-phosphorothioate; note = sugar modification: 2'-O-methoxyethylribose
  modified_base 17: mod_base = OTHER; note = sugar modification: 2'-O-methoxyethylribose; note = backbone modification: 5'-phosphorothioate
  modified_base 18: mod_base = OTHER; note = sugar modification: 2'-O-methoxyethylribose; note = thymine
atcccactgattctgaat

SEQ ID NO: 820 - RNA, 18 nt, synthetic construct
  source 1..18: mol_type = other RNA; note = Antisense oligonucleotide
  modified_base 1: mod_base = OTHER; note = backbone modification: 5'-phosphorothioate; note = sugar modification: 2'-O-methoxyethylribose; note = thymine
  modified_base 2: mod_base = OTHER; mod_base = m5c; note = backbone modification: 5'-phosphorothioate; note = sugar modification: 2'-O-methoxyethylribose
  modified_base 3: mod_base = OTHER; note = backbone modification: 5'-phosphorothioate; note = sugar modification: 2'-O-methoxyethylribose
  modified_base 4: mod_base = OTHER; note = backbone modification: 5'-phosphorothioate; note = thymine; note = sugar modification: 2'-O-methoxyethylribose
  modified_base 5: mod_base = m5c; mod_base = OTHER; note = backbone modification: 5'-phosphorothioate; note = sugar modification: 2'-O-methoxyethylribose
  modified_base 6: mod_base = m5c; mod_base = OTHER; note = sugar modification: 2'-O-methoxyethylribose; note = backbone modification: 5'-phosphorothioate
  modified_base 7: mod_base = OTHER; mod_base = m5c; note = sugar modification: 2'-O-methoxyethylribose; note = backbone modification: 5'-phosphorothioate
  modified_base 8: mod_base = OTHER; note = backbone modification: 5'-phosphorothioate; note = sugar modification: 2'-O-methoxyethylribose
  modified_base 9: mod_base = OTHER; mod_base = m5c; note = backbone modification: 5'-phosphorothioate; note = sugar modification: 2'-O-methoxyethylribose
  modified_base 10: mod_base = OTHER; note = thymine; note = sugar modification: 2'-O-methoxyethylribose; note = backbone modification: 5'-phosphorothioate
  modified_base 11: mod_base = OTHER; note = sugar modification: 2'-O-methoxyethylribose; note = backbone modification: 5'-phosphorothioate
  modified_base 12: mod_base = OTHER; note = sugar modification: 2'-O-methoxyethylribose; note = backbone modification: 5'-phosphorothioate
  modified_base 13: mod_base = OTHER; note = thymine; note = sugar modification: 2'-O-methoxyethylribose; note = backbone modification: 5'-phosphorothioate
  modified_base 14: mod_base = OTHER; note = thymine; note = sugar modification: 2'-O-methoxyethylribose; note = backbone modification: 5'-phosphorothioate
  modified_base 15: mod_base = m5c; mod_base = OTHER; note = backbone modification: 5'-phosphorothioate; note = sugar modification: 2'-O-methoxyethylribose
  modified_base 16: mod_base = OTHER; note = sugar modification: 2'-O-methoxyethylribose; note = backbone modification: 5'-phosphorothioate; note = thymine
  modified_base 17: mod_base = OTHER; note = sugar modification: 2'-O-methoxyethylribose; note = backbone modification: 5'-phosphorothioate
  modified_base 18: mod_base = OTHER; note = sugar modification: 2'-O-methoxyethylribose
tcatcccactgattctga

SEQ ID NO: 821 - RNA, 18 nt, synthetic construct
  source 1..18: mol_type = other RNA; note = Antisense oligonucleotide
  modified_base 1: mod_base = OTHER; note = backbone modification: 5'-phosphorothioate; note = sugar modification: 2'-O-methoxyethylribose; note = thymine
  modified_base 2: mod_base = OTHER; note = backbone modification: 5'-phosphorothioate; note = sugar modification: 2'-O-methoxyethylribose; note = thymine
  modified_base 3: mod_base = OTHER; mod_base = m5c; note = backbone modification: 5'-phosphorothioate; note = sugar modification: 2'-O-methoxyethylribose
  modified_base 4: mod_base = OTHER; note = sugar modification: 2'-O-methoxyethylribose; note = backbone modification: 5'-phosphorothioate
  modified_base 5: mod_base = OTHER; note = thymine; note = backbone modification: 5'-phosphorothioate; note = sugar modification: 2'-O-methoxyethylribose
  modified_base 6: mod_base = OTHER; mod_base = m5c; note = sugar modification: 2'-O-methoxyethylribose; note = backbone modification: 5'-phosphorothioate
  modified_base 7: mod_base = m5c; mod_base = OTHER; note = sugar modification: 2'-O-methoxyethylribose; note = backbone modification: 5'-phosphorothioate
  modified_base 8: mod_base = m5c; mod_base = OTHER; note = sugar modification: 2'-O-methoxyethylribose; note = backbone modification: 5'-phosphorothioate
  modified_base 9: mod_base = OTHER; note = backbone modification: 5'-phosphorothioate; note = sugar modification: 2'-O-methoxyethylribose
  modified_base 10: mod_base = m5c; mod_base = OTHER; note = sugar modification: 2'-O-methoxyethylribose; note = backbone modification: 5'-phosphorothioate
  modified_base 11: mod_base = OTHER; note = thymine; note = sugar modification: 2'-O-methoxyethylribose; note = backbone modification: 5'-phosphorothioate
  modified_base 12: mod_base = OTHER; note = backbone modification: 5'-phosphorothioate; note = sugar modification: 2'-O-methoxyethylribose
  modified_base 13: mod_base = OTHER; note = backbone modification: 5'-phosphorothioate; note = sugar modification: 2'-O-methoxyethylribose
  modified_base 14: mod_base = OTHER; note = sugar modification: 2'-O-methoxyethylribose; note = thymine; note = backbone modification: 5'-phosphorothioate
  modified_base 15: mod_base = OTHER; note = sugar modification: 2'-O-methoxyethylribose; note = backbone modification: 5'-phosphorothioate; note = thymine
  modified_base 16: mod_base = m5c; mod_base = OTHER; note = sugar modification: 2'-O-methoxyethylribose; note = backbone modification: 5'-phosphorothioate
  modified_base 17: mod_base = OTHER; note = thymine; note = backbone modification: 5'-phosphorothioate; note = sugar modification: 2'-O-methoxyethylribose
  modified_base 18: mod_base = OTHER; note = sugar modification: 2'-O-methoxyethylribose
ttcatcccactgattctg

SEQ ID NO: 822 - RNA, 18 nt, synthetic construct
  source 1..18: mol_type = other RNA; note = Antisense oligonucleotide
  modified_base 1: mod_base = OTHER; mod_base = m5c; note = sugar modification: 2'-O-methoxyethylribose; note = backbone modification: 5'-phosphorothioate
  modified_base 2: mod_base = OTHER; note = backbone modification: 5'-phosphorothioate; note = sugar modification: 2'-O-methoxyethylribose; note = thymine
  modified_base 3: mod_base = OTHER; note = thymine; note = backbone modification: 5'-phosphorothioate; note = sugar modification: 2'-O-methoxyethylribose
  modified_base 4: mod_base = m5c; mod_base = OTHER; note = sugar modification: 2'-O-methoxyethylribose; note = backbone modification: 5'-phosphorothioate
  modified_base 5: mod_base = OTHER; note = sugar modification: 2'-O-methoxyethylribose; note = backbone modification: 5'-phosphorothioate
  modified_base 6: mod_base = OTHER; note = backbone modification: 5'-phosphorothioate; note = thymine; note = sugar modification: 2'-O-methoxyethylribose
  modified_base 7: mod_base = m5c; mod_base = OTHER; note = sugar modification: 2'-O-methoxyethylribose; note = backbone modification: 5'-phosphorothioate
  modified_base 8: mod_base = m5c; mod_base = OTHER; note = sugar modification: 2'-O-methoxyethylribose; note = backbone modification: 5'-phosphorothioate
  modified_base 9: mod_base = m5c; mod_base = OTHER; note = sugar modification: 2'-O-methoxyethylribose; note = backbone modification: 5'-phosphorothioate
  modified_base 10: mod_base = OTHER; note = sugar modification: 2'-O-methoxyethylribose; note = backbone modification: 5'-phosphorothioate
  modified_base 11: mod_base = OTHER; mod_base = m5c; note = backbone modification: 5'-phosphorothioate; note = sugar modification: 2'-O-methoxyethylribose
  modified_base 12: mod_base = OTHER; note = backbone modification: 5'-phosphorothioate; note = thymine; note = sugar modification: 2'-O-methoxyethylribose
  modified_base 13: mod_base = OTHER; note = backbone modification: 5'-phosphorothioate; note = sugar modification: 2'-O-methoxyethylribose
  modified_base 14: mod_base = OTHER; note = backbone modification: 5'-phosphorothioate; note = sugar modification: 2'-O-methoxyethylribose
  modified_base 15: mod_base = OTHER; note = sugar modification: 2'-O-methoxyethylribose; note = backbone modification: 5'-phosphorothioate; note = thymine
  modified_base 16: mod_base = OTHER; note = backbone modification: 5'-phosphorothioate; note = thymine; note = sugar modification: 2'-O-methoxyethylribose
  modified_base 17: mod_base = m5c; mod_base = OTHER; note = sugar modification: 2'-O-methoxyethylribose; note = backbone modification: 5'-phosphorothioate
  modified_base 18: mod_base = OTHER; note = thymine; note = sugar modification: 2'-O-methoxyethylribose
cttcatcccactgattct

SEQ ID NO: 823 - RNA, 18 nt, synthetic construct
  source 1..18: mol_type = other RNA; note = Antisense oligonucleotide
  modified_base 1: mod_base = OTHER; note = backbone modification: 5'-phosphorothioate; note = sugar modification: 2'-O-methoxyethylribose
  modified_base 2: mod_base = m5c; mod_base = OTHER; note = sugar modification: 2'-O-methoxyethylribose; note = backbone modification: 5'-phosphorothioate
  modified_base 3: mod_base = OTHER; note = backbone modification: 5'-phosphorothioate; note = sugar modification: 2'-O-methoxyethylribose; note = thymine
  modified_base 4: mod_base = OTHER; note = thymine; note = backbone modification: 5'-phosphorothioate; note = sugar modification: 2'-O-methoxyethylribose
  modified_base 5: mod_base = m5c; mod_base = OTHER; note = backbone modification: 5'-phosphorothioate; note = sugar modification: 2'-O-methoxyethylribose
  modified_base 6: mod_base = OTHER; note = backbone modification: 5'-phosphorothioate; note = sugar modification: 2'-O-methoxyethylribose
  modified_base 7: mod_base = OTHER; note = thymine; note = backbone modification: 5'-phosphorothioate; note = sugar modification: 2'-O-methoxyethylribose
  modified_base 8: mod_base = m5c; mod_base = OTHER; note = backbone modification: 5'-phosphorothioate; note = sugar modification: 2'-O-methoxyethylribose
  modified_base 9: mod_base = m5c; mod_base = OTHER; note = sugar modification: 2'-O-methoxyethylribose; note = backbone modification: 5'-phosphorothioate
  modified_base 10: mod_base = m5c; mod_base = OTHER; note = backbone modification: 5'-phosphorothioate; note = sugar modification: 2'-O-methoxyethylribose
  modified_base 11: mod_base = OTHER; note = sugar modification: 2'-O-methoxyethylribose; note = backbone modification: 5'-phosphorothioate
  modified_base 12: mod_base = m5c; mod_base = OTHER; note = sugar modification: 2'-O-methoxyethylribose; note = backbone modification: 5'-phosphorothioate
  modified_base 13: mod_base = OTHER; note = sugar modification: 2'-O-methoxyethylribose; note = thymine; note = backbone modification: 5'-phosphorothioate
  modified_base 14: mod_base = OTHER; note = sugar modification: 2'-O-methoxyethylribose; note = backbone modification: 5'-phosphorothioate
  modified_base 15: mod_base = OTHER; note = sugar modification: 2'-O-methoxyethylribose; note = backbone modification: 5'-phosphorothioate
  modified_base 16: mod_base = OTHER; note = thymine; note = sugar modification: 2'-O-methoxyethylribose; note = backbone modification: 5'-phosphorothioate
  modified_base 17: mod_base = OTHER; note = thymine; note = backbone modification: 5'-phosphorothioate; note = sugar modification: 2'-O-methoxyethylribose
  modified_base 18: mod_base = m5c; mod_base = OTHER; note = sugar modification: 2'-O-methoxyethylribose
acttcatcccactgattc

SEQ ID NO: 824 - RNA, 18 nt, synthetic construct
  source 1..18: mol_type = other RNA; note = Antisense oligonucleotide
  modified_base 1: mod_base = OTHER; note = sugar modification: 2'-O-methoxyethylribose; note = backbone modification: 5'-phosphorothioate
  modified_base 2: mod_base = OTHER; note = thymine; note = backbone modification: 5'-phosphorothioate; note = sugar modification: 2'-O-methoxyethylribose
  modified_base 3: mod_base = OTHER; note = backbone modification: 5'-phosphorothioate; note = sugar modification: 2'-O-methoxyethylribose
  modified_base 4: mod_base = OTHER; mod_base = m5c; note = sugar modification: 2'-O-methoxyethylribose; note = backbone modification: 5'-phosphorothioate
  modified_base 5: mod_base = OTHER; note = thymine; note = sugar modification: 2'-O-methoxyethylribose; note = backbone modification: 5'-phosphorothioate
  modified_base 6: mod_base = OTHER; note = sugar modification: 2'-O-methoxyethylribose; note = thymine; note = backbone modification: 5'-phosphorothioate
  modified_base 7: mod_base = OTHER; mod_base = m5c; note = sugar modification: 2'-O-methoxyethylribose; note = backbone modification: 5'-phosphorothioate
  modified_base 8: mod_base = OTHER; note = backbone modification: 5'-phosphorothioate; note = sugar modification: 2'-O-methoxyethylribose
  modified_base 9: mod_base = OTHER; note = thymine; note = backbone modification: 5'-phosphorothioate; note = sugar modification: 2'-O-methoxyethylribose
  modified_base 10: mod_base = m5c; mod_base = OTHER; note = sugar modification: 2'-O-methoxyethylribose; note = backbone modification: 5'-phosphorothioate
  modified_base 11: mod_base = m5c; mod_base = OTHER; note = backbone modification: 5'-phosphorothioate; note = sugar modification: 2'-O-methoxyethylribose
  modified_base 12: mod_base = OTHER; mod_base = m5c; note = sugar modification: 2'-O-methoxyethylribose; note = backbone modification: 5'-phosphorothioate
  modified_base 13: mod_base = OTHER; note = sugar modification: 2'-O-methoxyethylribose; note = backbone modification: 5'-phosphorothioate
  modified_base 14: mod_base = m5c; mod_base = OTHER; note = backbone modification: 5'-phosphorothioate; note = sugar modification: 2'-O-methoxyethylribose
  modified_base 15: mod_base = OTHER; note = thymine; note = backbone modification: 5'-phosphorothioate; note = sugar modification: 2'-O-methoxyethylribose
  modified_base 16: mod_base = OTHER; note = sugar modification: 2'-O-methoxyethylribose; note = backbone modification: 5'-phosphorothioate
  modified_base 17: mod_base = OTHER; note = sugar modification: 2'-O-methoxyethylribose; note = backbone modification: 5'-phosphorothioate
  modified_base 18: mod_base = OTHER; note = thymine; note = sugar modification: 2'-O-methoxyethylribose
gtacttcatcccactgat

SEQ ID NO: 825 - RNA, 18 nt, synthetic construct
  source 1..18: mol_type = other RNA; note = Antisense oligonucleotide
  modified_base 1: mod_base = OTHER; note = backbone modification: 5'-phosphorothioate; note = sugar modification: 2'-O-methoxyethylribose; note = thymine
  modified_base 2: mod_base = OTHER; note = backbone modification: 5'-phosphorothioate; note = sugar modification: 2'-O-methoxyethylribose
  modified_base 3: mod_base = OTHER; note = sugar modification: 2'-O-methoxyethylribose; note = thymine; note = backbone modification: 5'-phosphorothioate
  modified_base 4: mod_base = OTHER; note = backbone modification: 5'-phosphorothioate; note = sugar modification: 2'-O-methoxyethylribose
  modified_base 5: mod_base = m5c; mod_base = OTHER; note = backbone modification: 5'-phosphorothioate; note = sugar modification: 2'-O-methoxyethylribose
  modified_base 6: mod_base = OTHER; note = sugar modification: 2'-O-methoxyethylribose; note = thymine; note = backbone modification: 5'-phosphorothioate
  modified_base 7: mod_base = OTHER; note = sugar modification: 2'-O-methoxyethylribose; note = thymine; note = backbone modification: 5'-phosphorothioate
  modified_base 8: mod_base = OTHER; mod_base = m5c; note = backbone modification: 5'-phosphorothioate; note = sugar modification: 2'-O-methoxyethylribose
  modified_base 9: mod_base = OTHER; note = sugar modification: 2'-O-methoxyethylribose; note = backbone modification: 5'-phosphorothioate
  modified_base 10: mod_base = OTHER; note = sugar modification: 2'-O-methoxyethylribose; note = backbone modification: 5'-phosphorothioate; note = thymine
  modified_base 11: mod_base = m5c; mod_base = OTHER; note = backbone modification: 5'-phosphorothioate; note = sugar modification: 2'-O-methoxyethylribose
  modified_base 12: mod_base = OTHER; mod_base = m5c; note = sugar modification: 2'-O-methoxyethylribose; note = backbone modification: 5'-phosphorothioate
  modified_base 13: mod_base = m5c; mod_base = OTHER; note = sugar modification: 2'-O-methoxyethylribose; note = backbone modification: 5'-phosphorothioate
  modified_base 14: mod_base = OTHER; note = sugar modification: 2'-O-methoxyethylribose; note = backbone modification: 5'-phosphorothioate
  modified_base 15: mod_base = OTHER; mod_base = m5c; note = backbone modification: 5'-phosphorothioate; note = sugar modification: 2'-O-methoxyethylribose
  modified_base 16: mod_base = OTHER; note = sugar modification: 2'-O-methoxyethylribose; note = thymine; note = backbone modification: 5'-phosphorothioate
  modified_base 17: mod_base = OTHER; note = backbone modification: 5'-phosphorothioate; note = sugar modification: 2'-O-methoxyethylribose
  modified_base 18: mod_base = OTHER; note = sugar modification: 2'-O-methoxyethylribose
tgtacttcatcccactga

SEQ ID NO: 826 - RNA, 18 nt, synthetic construct
  source 1..18: mol_type = other RNA; note = Antisense oligonucleotide
  modified_base 1: mod_base = OTHER; note = sugar modification: 2'-O-methoxyethylribose; note = thymine; note = backbone modification: 5'-phosphorothioate
  modified_base 2: mod_base = OTHER; note = sugar modification: 2'-O-methoxyethylribose; note = thymine; note = backbone modification: 5'-phosphorothioate
  modified_base 3: mod_base = OTHER; note = backbone modification: 5'-phosphorothioate; note = sugar modification: 2'-O-methoxyethylribose
  modified_base 4: mod_base = OTHER; note = thymine; note = sugar modification: 2'-O-methoxyethylribose; note = backbone modification: 5'-phosphorothioate
  modified_base 5: mod_base = OTHER; note = backbone modification: 5'-phosphorothioate; note = sugar modification: 2'-O-methoxyethylribose
  modified_base 6: mod_base = OTHER; mod_base = m5c; note = sugar modification: 2'-O-methoxyethylribose; note = backbone modification: 5'-phosphorothioate
  modified_base 7: mod_base = OTHER; note = thymine; note = backbone modification: 5'-phosphorothioate; note = sugar modification: 2'-O-methoxyethylribose
  modified_base 8: mod_base = OTHER; note = backbone modification: 5'-phosphorothioate; note = thymine; note = sugar modification: 2'-O-methoxyethylribose
  modified_base 9: mod_base = m5c; mod_base = OTHER; note = backbone modification: 5'-phosphorothioate; note = sugar modification: 2'-O-methoxyethylribose
  modified_base 10: mod_base = OTHER; note = sugar modification: 2'-O-methoxyethylribose; note = backbone modification: 5'-phosphorothioate
  modified_base 11: mod_base = OTHER; note = thymine; note = backbone modification: 5'-phosphorothioate; note = sugar modification: 2'-O-methoxyethylribose
  modified_base 12: mod_base = m5c; mod_base = OTHER; note = backbone modification: 5'-phosphorothioate; note = sugar modification: 2'-O-methoxyethylribose
  modified_base 13: mod_base = m5c; mod_base = OTHER; note = backbone modification: 5'-phosphorothioate; note = sugar modification: 2'-O-methoxyethylribose
  modified_base 14: mod_base = m5c; mod_base = OTHER; note = sugar modification: 2'-O-methoxyethylribose; note = backbone modification: 5'-phosphorothioate
  modified_base 15: mod_base = OTHER; note = sugar modification: 2'-O-methoxyethylribose; note = backbone modification: 5'-phosphorothioate
  modified_base 16: mod_base = m5c; mod_base = OTHER; note = sugar modification: 2'-O-methoxyethylribose; note = backbone modification: 5'-phosphorothioate
  modified_base 17: mod_base = OTHER; note = thymine; note = backbone modification: 5'-phosphorothioate; note = sugar modification: 2'-O-methoxyethylribose
  modified_base 18: mod_base = OTHER; note = sugar modification: 2'-O-methoxyethylribose
ttgtacttcatcccactg

SEQ ID NO: 827 - RNA, 18 nt, synthetic construct
  source 1..18: mol_type = other RNA; note = Antisense oligonucleotide
  modified_base 1: mod_base = OTHER; mod_base = m5c; note = backbone modification: 5'-phosphorothioate; note = sugar modification: 2'-O-methoxyethylribose
  modified_base 2: mod_base = OTHER; note = backbone modification: 5'-phosphorothioate; note = sugar modification: 2'-O-methoxyethylribose; note = thymine
  modified_base 3: mod_base = OTHER; note = sugar modification: 2'-O-methoxyethylribose; note = backbone modification: 5'-phosphorothioate; note = thymine
  modified_base 4: mod_base = OTHER; note = sugar modification: 2'-O-methoxyethylribose; note = backbone modification: 5'-phosphorothioate
  modified_base 5: mod_base = OTHER; note = thymine; note = backbone modification: 5'-phosphorothioate; note = sugar modification: 2'-O-methoxyethylribose
  modified_base 6: mod_base = OTHER; note = sugar modification: 2'-O-methoxyethylribose; note = backbone modification: 5'-phosphorothioate
  modified_base 7: mod_base = m5c; mod_base = OTHER; note = backbone modification: 5'-phosphorothioate; note = sugar modification: 2'-O-methoxyethylribose
  modified_base 8: mod_base = OTHER; note = backbone modification: 5'-phosphorothioate; note = thymine; note = sugar modification: 2'-O-methoxyethylribose
  modified_base 9: mod_base = OTHER; note = sugar modification: 2'-O-methoxyethylribose; note = backbone modification: 5'-phosphorothioate; note = thymine
  modified_base 10: mod_base = OTHER; mod_base = m5c; note = sugar modification: 2'-O-methoxyethylribose; note = backbone modification: 5'-phosphorothioate
  modified_base 11: mod_base = OTHER; note = backbone modification: 5'-phosphorothioate; note = sugar modification: 2'-O-methoxyethylribose
  modified_base 12: mod_base = OTHER; note = thymine; note = backbone modification: 5'-phosphorothioate; note = sugar modification: 2'-O-methoxyethylribose
  modified_base 13: mod_base = m5c; mod_base = OTHER; note = sugar modification: 2'-O-methoxyethylribose; note = backbone modification: 5'-phosphorothioate
  modified_base 14: mod_base = m5c; mod_base = OTHER; note = backbone modification: 5'-phosphorothioate; note = sugar modification: 2'-O-methoxyethylribose
  modified_base 15: mod_base = m5c; mod_base = OTHER; note = backbone modification: 5'-phosphorothioate; note = sugar modification: 2'-O-methoxyethylribose
  modified_base 16: mod_base = OTHER; note = backbone modification: 5'-phosphorothioate; note = sugar modification: 2'-O-methoxyethylribose
  modified_base 17: mod_base = m5c; mod_base = OTHER; note = sugar modification: 2'-O-methoxyethylribose; note = backbone modification: 5'-phosphorothioate
  modified_base 18: mod_base = OTHER; note = thymine; note = sugar modification: 2'-O-methoxyethylribose
cttgtacttcatcccact

SEQ ID NO: 828 - RNA, 18 nt, synthetic construct
  source 1..18: mol_type = other RNA; note = Antisense oligonucleotide
  modified_base 1: mod_base = OTHER; note = thymine; note = backbone modification: 5'-phosphorothioate; note = sugar modification: 2'-O-methoxyethylribose
  modified_base 2: mod_base = OTHER; note = backbone modification: 5'-phosphorothioate; note = thymine; note = sugar modification: 2'-O-methoxyethylribose
  modified_base 3: mod_base = OTHER; mod_base = m5c; note = backbone modification: 5'-phosphorothioate; note = sugar modification: 2'-O-methoxyethylribose
  modified_base 4: mod_base = OTHER; note = sugar modification: 2'-O-methoxyethylribose; note = thymine; note = backbone modification: 5'-phosphorothioate
  modified_base 5: mod_base = OTHER; note = backbone modification: 5'-phosphorothioate; note = sugar modification: 2'-O-methoxyethylribose; note = thymine
  modified_base 6: mod_base = OTHER; note = backbone modification: 5'-phosphorothioate; note = sugar modification: 2'-O-methoxyethylribose
  modified_base 7: mod_base = OTHER; note = thymine; note = backbone modification: 5'-phosphorothioate; note = sugar modification: 2'-O-methoxyethylribose
  modified_base 8: mod_base = OTHER; note = backbone modification: 5'-phosphorothioate; note = sugar modification: 2'-O-methoxyethylribose
  modified_base 9: mod_base = OTHER; mod_base = m5c; note = backbone modification: 5'-phosphorothioate; note = sugar modification: 2'-O-methoxyethylribose
  modified_base 10: mod_base = OTHER; note = thymine; note = backbone modification: 5'-phosphorothioate; note = sugar modification: 2'-O-methoxyethylribose
  modified_base 11: mod_base = OTHER; note = backbone modification: 5'-phosphorothioate; note = thymine; note = sugar modification: 2'-O-methoxyethylribose
  modified_base 12: mod_base = OTHER; mod_base = m5c; note = backbone modification: 5'-phosphorothioate; note = sugar modification: 2'-O-methoxyethylribose
  modified_base 13: mod_base = OTHER; note = backbone modification: 5'-phosphorothioate; note = sugar modification: 2'-O-methoxyethylribose
  modified_base 14: mod_base = OTHER; note = backbone modification: 5'-phosphorothioate; note = thymine; note = sugar modification: 2'-O-methoxyethylribose
  modified_base 15: mod_base = OTHER; mod_base = m5c; note = sugar modification: 2'-O-methoxyethylribose; note = backbone modification: 5'-phosphorothioate
  modified_base 16: mod_base = m5c; mod_base = OTHER; note = backbone modification: 5'-phosphorothioate; note = sugar modification: 2'-O-methoxyethylribose
  modified_base 17: mod_base = m5c; mod_base = OTHER; note = backbone modification: 5'-phosphorothioate; note = sugar modification: 2'-O-methoxyethylribose
  modified_base 18: mod_base = OTHER; note = sugar modification: 2'-O-methoxyethylribose
ttcttgtacttcatccca

SEQ ID NO: 829 - RNA, 18 nt, synthetic construct
  source 1..18: mol_type = other RNA; note = Antisense oligonucleotide
  modified_base 1: mod_base = OTHER; note = backbone modification: 5'-phosphorothioate; note = sugar modification: 2'-O-methoxyethylribose
  modified_base 2: mod_base = OTHER; note = backbone modification: 5'-phosphorothioate; note = thymine; note = sugar modification: 2'-O-methoxyethylribose
  modified_base 3: mod_base = OTHER; note = backbone modification: 5'-phosphorothioate; note = thymine; note = sugar modification: 2'-O-methoxyethylribose
  modified_base 4: mod_base = OTHER; mod_base = m5c; note = sugar modification: 2'-O-methoxyethylribose; note = backbone modification: 5'-phosphorothioate
  modified_base 5: mod_base = OTHER; note = backbone modification: 5'-phosphorothioate; note = sugar modification: 2'-O-methoxyethylribose; note = thymine
  modified_base 6: mod_base = OTHER; note = backbone modification: 5'-phosphorothioate; note = sugar modification: 2'-O-methoxyethylribose; note = thymine
  modified_base 7: mod_base = OTHER; note = backbone modification: 5'-phosphorothioate; note = sugar modification: 2'-O-methoxyethylribose
  modified_base 8: mod_base = OTHER; note = thymine; note = backbone modification: 5'-phosphorothioate; note = sugar modification: 2'-O-methoxyethylribose
  modified_base 9: mod_base = OTHER; note = sugar modification: 2'-O-methoxyethylribose; note = backbone modification: 5'-phosphorothioate
  modified_base 10: mod_base = m5c; mod_base = OTHER; note = sugar modification: 2'-O-methoxyethylribose; note = backbone modification: 5'-phosphorothioate
  modified_base 11: mod_base = OTHER; note = sugar modification: 2'-O-methoxyethylribose; note = backbone modification: 5'-phosphorothioate; note = thymine
  modified_base 12: mod_base = OTHER; note = sugar modification: 2'-O-methoxyethylribose; note = thymine; note = backbone modification: 5'-phosphorothioate
  modified_base 13: mod_base = OTHER; mod_base = m5c; note = backbone modification: 5'-phosphorothioate; note = sugar modification: 2'-O-methoxyethylribose
  modified_base 14: mod_base = OTHER; note = backbone modification: 5'-phosphorothioate; note = sugar modification: 2'-O-methoxyethylribose
  modified_base 15: mod_base = OTHER; note = sugar modification: 2'-O-methoxyethylribose; note = thymine; note = backbone modification: 5'-phosphorothioate
  modified_base 16: mod_base = OTHER; mod_base = m5c; note = backbone modification: 5'-phosphorothioate; note = sugar modification: 2'-O-methoxyethylribose
  modified_base 17: mod_base = OTHER; mod_base = m5c; note = backbone modification: 5'-phosphorothioate; note = sugar modification: 2'-O-methoxyethylribose
  modified_base 18: mod_base = OTHER; mod_base = m5c; note = sugar modification: 2'-O-methoxyethylribose
gttcttgtacttcatccc

SEQ ID NO: 830 - RNA, 18 nt, synthetic construct
  source 1..18: mol_type = other RNA; note = Antisense oligonucleotide
  modified_base 1: mod_base = OTHER; note = sugar modification: 2'-O-methoxyethylribose; note = backbone modification: 5'-phosphorothioate; note = thymine
  modified_base 2: mod_base = OTHER; note = sugar modification: 2'-O-methoxyethylribose; note = backbone modification: 5'-phosphorothioate
  modified_base 3: mod_base = OTHER; note = sugar modification: 2'-O-methoxyethylribose; note = thymine; note = backbone modification: 5'-phosphorothioate
  modified_base 4: mod_base = OTHER; note = thymine; note = backbone modification: 5'-phosphorothioate; note = sugar modification: 2'-O-methoxyethylribose
  modified_base 5: mod_base = m5c; mod_base = OTHER; note = backbone modification: 5'-phosphorothioate; note = sugar modification: 2'-O-methoxyethylribose
  modified_base 6: mod_base = OTHER; note = backbone modification: 5'-phosphorothioate; note = sugar modification: 2'-O-methoxyethylribose; note = thymine
  modified_base 7: mod_base = OTHER; note = backbone modification: 5'-phosphorothioate; note = thymine; note = sugar modification: 2'-O-methoxyethylribose
  modified_base 8: mod_base = OTHER; note = backbone modification: 5'-phosphorothioate; note = sugar modification: 2'-O-methoxyethylribose
  modified_base 9: mod_base = OTHER; note = thymine; note = sugar modification: 2'-O-methoxyethylribose; note = backbone modification: 5'-phosphorothioate
  modified_base 10: mod_base = OTHER; note = backbone modification: 5'-phosphorothioate; note = sugar modification: 2'-O-methoxyethylribose
  modified_base 11: mod_base = m5c; mod_base = OTHER; note = backbone modification: 5'-phosphorothioate; note = sugar modification: 2'-O-methoxyethylribose
  modified_base 12: mod_base = OTHER; note = thymine; note = sugar modification: 2'-O-methoxyethylribose; note = backbone modification: 5'-phosphorothioate
  modified_base 13: mod_base = OTHER; note = backbone modification: 5'-phosphorothioate; note = sugar modification: 2'-O-methoxyethylribose; note = thymine
  modified_base 14: mod_base = m5c; mod_base = OTHER; note = sugar modification: 2'-O-methoxyethylribose; note = backbone modification: 5'-phosphorothioate
  modified_base 15: mod_base = OTHER; note = backbone modification: 5'-phosphorothioate; note = sugar modification: 2'-O-methoxyethylribose
  modified_base 16: mod_base = OTHER; note = thymine; note = backbone modification: 5'-phosphorothioate; note = sugar modification: 2'-O-methoxyethylribose
  modified_base 17: mod_base = OTHER; mod_base = m5c; note = sugar modification: 2'-O-methoxyethylribose; note = backbone modification: 5'-phosphorothioate
  modified_base 18: mod_base = OTHER; mod_base = m5c; note = sugar modification: 2'-O-methoxyethylribose
tgttcttgtacttcatcc

SEQ ID NO: 831 - RNA, 18 nt, synthetic construct
  source 1..18: mol_type = other RNA; note = Antisense oligonucleotide
  modified_base 1: mod_base = OTHER; note = backbone modification: 5'-phosphorothioate; note = sugar modification: 2'-O-methoxyethylribose
  modified_base 2: mod_base = OTHER; note = backbone modification: 5'-phosphorothioate; note = thymine; note = sugar modification: 2'-O-methoxyethylribose
  modified_base 3: mod_base = OTHER; note = sugar modification: 2'-O-methoxyethylribose; note = backbone modification: 5'-phosphorothioate
  modified_base 4: mod_base = OTHER; note = backbone modification: 5'-phosphorothioate; note = sugar modification: 2'-O-methoxyethylribose; note = thymine
  modified_base 5: mod_base = OTHER; note = backbone modification: 5'-phosphorothioate; note = thymine; note = sugar modification: 2'-O-methoxyethylribose
  modified_base 6: mod_base = m5c; mod_base = OTHER; note = backbone modification: 5'-phosphorothioate; note = sugar modification: 2'-O-methoxyethylribose
  modified_base 7: mod_base = OTHER; note = sugar modification: 2'-O-methoxyethylribose; note = backbone modification: 5'-phosphorothioate; note = thymine
  modified_base 8: mod_base = OTHER; note = thymine; note = sugar modification: 2'-O-methoxyethylribose; note = backbone modification: 5'-phosphorothioate
  modified_base 9: mod_base = OTHER; note = backbone modification: 5'-phosphorothioate; note = sugar modification: 2'-O-methoxyethylribose
  modified_base 10: mod_base = OTHER; note = thymine; note = backbone modification: 5'-phosphorothioate; note = sugar modification: 2'-O-methoxyethylribose
  modified_base 11: mod_base = OTHER; note = backbone modification: 5'-phosphorothioate; note = sugar modification: 2'-O-methoxyethylribose
  modified_base 12: mod_base = OTHER; mod_base = m5c; note = backbone modification: 5'-phosphorothioate; note = sugar modification: 2'-O-methoxyethylribose
  modified_base 13: mod_base = OTHER; note = sugar modification: 2'-O-methoxyethylribose; note = thymine; note = backbone modification: 5'-phosphorothioate
  modified_base 14: mod_base = OTHER; note = thymine; note = sugar modification: 2'-O-methoxyethylribose; note = backbone modification: 5'-phosphorothioate
  modified_base 15: mod_base = m5c; mod_base = OTHER; note = backbone modification: 5'-phosphorothioate; note = sugar modification: 2'-O-methoxyethylribose
  modified_base 16: mod_base = OTHER; note = backbone modification: 5'-phosphorothioate; note = sugar modification: 2'-O-methoxyethylribose
  modified_base 17: mod_base = OTHER; note = thymine; note = backbone modification: 5'-phosphorothioate; note = sugar modification: 2'-O-methoxyethylribose
  modified_base 18: mod_base = OTHER; mod_base = m5c; note = sugar modification: 2'-O-methoxyethylribose
gtgttcttgtacttcatc

SEQ ID NO: 832 - RNA, 18 nt, synthetic construct
  source 1..18: mol_type = other RNA; note = Antisense oligonucleotide
  modified_base 1: mod_base = OTHER; note = backbone modification: 5'-phosphorothioate; note = sugar modification: 2'-O-methoxyethylribose
  modified_base 2: mod_base = OTHER; note = backbone modification: 5'-phosphorothioate; note = sugar modification: 2'-O-methoxyethylribose
  modified_base 3: mod_base = OTHER; note = backbone modification: 5'-phosphorothioate; note = sugar modification: 2'-O-methoxyethylribose
  modified_base 4: mod_base = OTHER; note = sugar modification: 2'-O-methoxyethylribose; note = thymine; note = backbone modification: 5'-phosphorothioate
  modified_base 5: mod_base = OTHER; note = sugar modification: 2'-O-methoxyethylribose; note = backbone modification: 5'-phosphorothioate
  modified_base 6: mod_base = OTHER; note = thymine; note = backbone modification: 5'-phosphorothioate; note = sugar modification: 2'-O-methoxyethylribose
  modified_base 7: mod_base = OTHER; note = sugar modification: 2'-O-methoxyethylribose; note = thymine; note = backbone modification: 5'-phosphorothioate
  modified_base 8: mod_base = m5c; mod_base = OTHER; note = backbone modification: 5'-phosphorothioate; note = sugar modification: 2'-O-methoxyethylribose
  modified_base 9: mod_base = OTHER; note = sugar modification: 2'-O-methoxyethylribose; note = backbone modification: 5'-phosphorothioate; note = thymine
  modified_base 10: mod_base = OTHER; note = sugar modification: 2'-O-methoxyethylribose; note = thymine; note = backbone modification: 5'-phosphorothioate
  modified_base 11: mod_base = OTHER; note = backbone modification: 5'-phosphorothioate; note = sugar modification: 2'-O-methoxyethylribose
  modified_base 12: mod_base = OTHER; note = sugar modification: 2'-O-methoxyethylribose; note = thymine; note = backbone modification: 5'-phosphorothioate
  modified_base 13: mod_base = OTHER; note = backbone modification: 5'-phosphorothioate; note = sugar modification: 2'-O-methoxyethylribose
  modified_base 14: mod_base = OTHER; mod_base = m5c; note = backbone modification: 5'-phosphorothioate; note = sugar modification: 2'-O-methoxyethylribose
  modified_base 15: mod_base = OTHER; note = thymine; note = sugar modification: 2'-O-methoxyethylribose; note = backbone modification: 5'-phosphorothioate
  modified_base 16: mod_base = OTHER; note = sugar modification: 2'-O-methoxyethylribose; note = thymine; note = backbone modification: 5'-phosphorothioate
  modified_base 17: mod_base = OTHER; mod_base = m5c; note = backbone modification: 5'-phosphorothioate; note = sugar modification: 2'-O-methoxyethylribose
  modified_base 18: mod_base = OTHER; note = sugar modification: 2'-O-methoxyethylribose
aggtgttcttgtacttca

SEQ ID NO: 833 - RNA, 18 nt, synthetic construct
  source 1..18: mol_type = other RNA; note = Antisense oligonucleotide
  modified_base 1: mod_base = OTHER; note = backbone modification: 5'-phosphorothioate; note = sugar modification: 2'-O-methoxyethylribose
  modified_base 2: mod_base = OTHER; note = backbone modification: 5'-phosphorothioate; note = sugar modification: 2'-O-methoxyethylribose
  modified_base 3: mod_base = OTHER; note = sugar modification: 2'-O-methoxyethylribose; note = backbone modification: 5'-phosphorothioate
  modified_base 4: mod_base = OTHER; note = sugar modification: 2'-O-methoxyethylribose; note = backbone modification: 5'-phosphorothioate
  modified_base 5: mod_base = OTHER; note = backbone modification: 5'-phosphorothioate; note = thymine; note = sugar modification: 2'-O-methoxyethylribose
  modified_base 6: mod_base = OTHER; note = backbone modification: 5'-phosphorothioate; note = sugar modification: 2'-O-methoxyethylribose
  modified_base 7: mod_base = OTHER; note = backbone modification: 5'-phosphorothioate; note = thymine; note = sugar modification: 2'-O-methoxyethylribose
  modified_base 8: mod_base = OTHER; note = thymine; note = backbone modification: 5'-phosphorothioate; note = sugar modification: 2'-O-methoxyethylribose
  modified_base 9: mod_base = m5c; mod_base = OTHER; note = backbone modification: 5'-phosphorothioate; note = sugar modification: 2'-O-methoxyethylribose
  modified_base 10: mod_base = OTHER; note = thymine; note = sugar modification: 2'-O-methoxyethylribose; note = backbone modification: 5'-phosphorothioate
  modified_base 11: mod_base = OTHER; note = sugar modification: 2'-O-methoxyethylribose; note = thymine; note = backbone modification: 5'-phosphorothioate
  modified_base 12: mod_base = OTHER; note = backbone modification: 5'-phosphorothioate; note = sugar modification: 2'-O-methoxyethylribose
  modified_base 13: mod_base = OTHER; note = backbone modification: 5'-phosphorothioate; note = sugar modification: 2'-O-methoxyethylribose; note = thymine
  modified_base 14: mod_base = OTHER; note = sugar modification: 2'-O-methoxyethylribose; note = backbone modification: 5'-phosphorothioate
  modified_base 15: mod_base = OTHER; mod_base = m5c; note = sugar modification: 2'-O-methoxyethylribose; note = backbone modification: 5'-phosphorothioate
  modified_base 16: mod_base = OTHER; note = sugar modification: 2'-O-methoxyethylribose; note = thymine; note = backbone modification: 5'-phosphorothioate
  modified_base 17: mod_base = OTHER; note = backbone modification: 5'-phosphorothioate; note = thymine; note = sugar modification: 2'-O-methoxyethylribose
  modified_base 18: mod_base = m5c; mod_base = OTHER; note = sugar modification: 2'-O-methoxyethylribose
aaggtgttcttgtacttc

SEQ ID NO: 834 - RNA, 18 nt, synthetic construct
  source 1..18: mol_type = other RNA; note = Antisense oligonucleotide
  modified_base 1: mod_base = OTHER; note = backbone modification: 5'-phosphorothioate; note = sugar modification: 2'-O-methoxyethylribose
  modified_base 2: mod_base = OTHER; note = sugar modification: 2'-O-methoxyethylribose; note = backbone modification: 5'-phosphorothioate
  modified_base 3: mod_base = OTHER; note = sugar modification: 2'-O-methoxyethylribose; note = backbone modification: 5'-phosphorothioate
  modified_base 4: mod_base = OTHER; note = backbone modification: 5'-phosphorothioate; note = sugar modification: 2'-O-methoxyethylribose
  modified_base 5: mod_base = OTHER; note = sugar modification: 2'-O-methoxyethylribose; note = backbone modification: 5'-phosphorothioate
  modified_base 6: mod_base = OTHER; note = thymine; note = sugar modification: 2'-O-methoxyethylribose; note = backbone modification: 5'-phosphorothioate
  modified_base 7: mod_base = OTHER; note = sugar modification: 2'-O-methoxyethylribose; note = backbone modification: 5'-phosphorothioate
  modified_base 8: mod_base = OTHER; note = thymine; note = sugar modification: 2'-O-methoxyethylribose; note = backbone modification: 5'-phosphorothioate
  modified_base 9: mod_base = OTHER; note = thymine; note = sugar modification: 2'-O-methoxyethylribose; note = backbone modification: 5'-phosphorothioate
  modified_base 10: mod_base = m5c; mod_base = OTHER; note = sugar modification: 2'-O-methoxyethylribose; note = backbone modification: 5'-phosphorothioate
  modified_base 11: mod_base = OTHER; note = sugar modification: 2'-O-methoxyethylribose; note = thymine; note = backbone modification: 5'-phosphorothioate
  modified_base 12: mod_base = OTHER; note = thymine; note = sugar modification: 2'-O-methoxyethylribose; note = backbone modification: 5'-phosphorothioate
  modified_base 13: mod_base = OTHER; note = backbone modification: 5'-phosphorothioate; note = sugar modification: 2'-O-methoxyethylribose
  modified_base 14: mod_base = OTHER; note = backbone modification: 5'-phosphorothioate; note = sugar modification: 2'-O-methoxyethylribose; note = thymine
  modified_base 15: mod_base = OTHER; note = sugar modification: 2'-O-methoxyethylribose; note = backbone modification: 5'-phosphorothioate
  modified_base 16: mod_base = OTHER; mod_base = m5c; note = backbone modification: 5'-phosphorothioate; note = sugar modification: 2'-O-methoxyethylribose
  modified_base 17: mod_base = OTHER; note = thymine; note = sugar modification: 2'-O-methoxyethylribose; note = backbone modification: 5'-phosphorothioate
  modified_base 18: mod_base = OTHER; note = thymine; note = sugar modification: 2'-O-methoxyethylribose
gaaggtgttcttgtactt

SEQ ID NO: 835 - RNA, 18 nt, synthetic construct
  source 1..18: mol_type = other RNA; note = Antisense oligonucleotide
  modified_base 1: mod_base = OTHER; note = sugar modification: 2'-O-methoxyethylribose; note = backbone modification: 5'-phosphorothioate; note = thymine
  modified_base 2: mod_base = OTHER; note = backbone modification: 5'-phosphorothioate; note = sugar modification: 2'-O-methoxyethylribose
  modified_base 3: mod_base = OTHER; note = backbone modification: 5'-phosphorothioate; note = sugar modification: 2'-O-methoxyethylribose
  modified_base 4: mod_base = OTHER; note = sugar modification: 2'-O-methoxyethylribose; note = backbone modification: 5'-phosphorothioate
  modified_base 5: mod_base = OTHER; note = backbone modification: 5'-phosphorothioate; note = sugar modification: 2'-O-methoxyethylribose
  modified_base 6: mod_base = OTHER; note = sugar modification: 2'-O-methoxyethylribose; note = backbone modification: 5'-phosphorothioate
  modified_base 7: mod_base = OTHER; note = backbone modification: 5'-phosphorothioate; note = thymine; note = sugar modification: 2'-O-methoxyethylribose
  modified_base 8: mod_base = OTHER; note = backbone modification: 5'-phosphorothioate; note = sugar modification: 2'-O-methoxyethylribose
  modified_base 9: mod_base = OTHER; note = thymine; note = sugar modification: 2'-O-methoxyethylribose; note = backbone modification: 5'-phosphorothioate
  modified_base 10: mod_base = OTHER; note = sugar modification: 2'-O-methoxyethylribose; note = thymine; note = backbone modification: 5'-phosphorothioate
  modified_base 11: mod_base = OTHER; mod_base = m5c; note = backbone modification: 5'-phosphorothioate; note = sugar modification: 2'-O-methoxyethylribose
  modified_base 12: mod_base = OTHER; note = thymine; note = sugar modification: 2'-O-methoxyethylribose; note = backbone modification: 5'-phosphorothioate
  modified_base 13: mod_base = OTHER; note = backbone modification: 5'-phosphorothioate; note = thymine; note = sugar modification: 2'-O-methoxyethylribose
  modified_base 14: mod_base = OTHER; note = backbone modification: 5'-phosphorothioate; note = sugar modification: 2'-O-methoxyethylribose
  modified_base 15: mod_base = OTHER; note = sugar modification: 2'-O-methoxyethylribose; note = thymine; note = backbone modification: 5'-phosphorothioate
  modified_base 16: mod_base = OTHER; note = sugar modification: 2'-O-methoxyethylribose; note = backbone modification: 5'-phosphorothioate
  modified_base 17: mod_base = OTHER; mod_base = m5c; note = sugar modification: 2'-O-methoxyethylribose; note = backbone modification: 5'-phosphorothioate
  modified_base 18: mod_base = OTHER; note = thymine; note = sugar modification: 2'-O-methoxyethylribose
tgaaggtgttcttgtact

SEQ ID NO: 836 - RNA, 18 nt, synthetic construct
  source 1..18: mol_type = other RNA; note = Antisense oligonucleotide
  modified_base 1: mod_base = OTHER; note = backbone modification: 5'-phosphorothioate; note = thymine; note = sugar modification: 2'-O-methoxyethylribose
  modified_base 2: mod_base = m5c; mod_base = OTHER; note = sugar modification: 2'-O-methoxyethylribose; note = backbone modification: 5'-phosphorothioate
  modified_base 3: mod_base = OTHER; note = backbone modification: 5'-phosphorothioate; note = sugar modification: 2'-O-methoxyethylribose; note = thymine
  modified_base 4: mod_base = OTHER; note = backbone modification: 5'-phosphorothioate; note = sugar modification: 2'-O-methoxyethylribose
  modified_base 5: mod_base = OTHER; note = backbone modification: 5'-phosphorothioate; note = sugar modification: 2'-O-methoxyethylribose
  modified_base 6: mod_base = OTHER; note = backbone modification: 5'-phosphorothioate; note = sugar modification: 2'-O-methoxyethylribose
  modified_base 7: mod_base = OTHER; note = sugar modification: 2'-O-methoxyethylribose; note = backbone modification: 5'-phosphorothioate
  modified_base 8: mod_base = OTHER; note = backbone modification: 5'-phosphorothioate; note = sugar modification: 2'-O-methoxyethylribose
  modified_base 9: mod_base = OTHER; note = sugar modification: 2'-O-methoxyethylribose; note = thymine; note = backbone modification: 5'-phosphorothioate
  modified_base 10: mod_base = OTHER; note = backbone modification: 5'-phosphorothioate; note = sugar modification: 2'-O-methoxyethylribose
  modified_base 11: mod_base = OTHER; note = backbone modification: 5'-phosphorothioate; note = thymine; note = sugar modification: 2'-O-methoxyethylribose
  modified_base 12: mod_base = OTHER; note = backbone modification: 5'-phosphorothioate; note = thymine; note = sugar modification: 2'-O-methoxyethylribose
  modified_base 13: mod_base = m5c; mod_base = OTHER; note = sugar modification: 2'-O-methoxyethylribose; note = backbone modification: 5'-phosphorothioate
  modified_base 14: mod_base = OTHER; note = sugar modification: 2'-O-methoxyethylribose; note = backbone modification: 5'-phosphorothioate; note = thymine
  modified_base 15: mod_base = OTHER; note = sugar modification: 2'-O-methoxyethylribose; note = backbone modification: 5'-phosphorothioate; note = thymine
  modified_base 16: mod_base = OTHER; note = backbone modification: 5'-phosphorothioate; note = sugar modification: 2'-O-methoxyethylribose
  modified_base 17: mod_base = OTHER; note = sugar modification: 2'-O-methoxyethylribose; note = thymine; note = backbone modification: 5'-phosphorothioate
  modified_base 18: mod_base = OTHER; note = sugar modification: 2'-O-methoxyethylribose
tctgaaggtgttcttgta

SEQ ID NO: 837 - RNA, 18 nt, synthetic construct
  source 1..18: mol_type = other RNA; note = Antisense oligonucleotide
  modified_base 1: mod_base = OTHER; note = backbone modification: 5'-phosphorothioate; note = sugar modification: lna; note = thymine
  modified_base 2: mod_base = OTHER; note = sugar modification: lna; note = backbone modification: 5'-phosphorothioate
  modified_base 3: mod_base = OTHER; note = backbone modification: 5'-phosphorothioate
  modified_base 4: mod_base = OTHER; note = backbone modification: 5'-phosphorothioate
  modified_base 5: mod_base = OTHER; note = backbone modification: 5'-phosphorothioate
  modified_base 6: mod_base = OTHER; note = backbone modification: 5'-phosphorothioate
  modified_base 7: mod_base = OTHER; note = backbone modification: 5'-phosphorothioate
  modified_base 8: mod_base = OTHER; note = backbone modification: 5'-phosphorothioate
  modified_base 9: mod_base = OTHER; note = backbone modification: 5'-phosphorothioate
  modified_base 10: mod_base = OTHER; note = backbone modification: 5'-phosphorothioate
  modified_base 11: mod_base = OTHER; note = backbone modification: 5'-phosphorothioate
  modified_base 12: mod_base = OTHER; note = backbone modification: 5'-phosphorothioate
  modified_base 13: mod_base = OTHER; note = backbone modification: 5'-phosphorothioate
  modified_base 14: mod_base = OTHER; note = backbone modification: 5'-phosphorothioate
  modified_base 15: mod_base = OTHER; note = backbone modification: 5'-phosphorothioate
  modified_base 16: mod_base = OTHER; note = backbone modification: 5'-phosphorothioate
  modified_base 17: mod_base = OTHER; note = sugar modification: lna; note = backbone modification: 5'-phosphorothioate
  modified_base 18: mod_base = OTHER; note = sugar modification: lna
tcatcccactgattctga

SEQ ID NO: 838 - RNA, 18 nt, synthetic construct
  source 1..18: mol_type = other RNA; note = Antisense oligonucleotide
  modified_base 1: mod_base = OTHER; note = backbone modification: 5'-phosphorothioate
  modified_base 2: mod_base = OTHER; note = backbone modification: 5'-phosphorothioate
  modified_base 3: mod_base = OTHER; note = backbone modification: 5'-phosphorothioate
  modified_base 4: mod_base = OTHER; note = backbone modification: 5'-phosphorothioate
  modified_base 5: mod_base = OTHER; note = backbone modification: 5'-phosphorothioate
  modified_base 6: mod_base = OTHER; note = backbone modification: 5'-phosphorothioate
  modified_base 7: mod_base = OTHER; note = backbone modification: 5'-phosphorothioate
  modified_base 8: mod_base = OTHER; note = backbone modification: 5'-phosphorothioate
  modified_base 9: mod_base = OTHER; note = backbone modification: 5'-phosphorothioate
  modified_base 10: mod_base = OTHER; note = backbone modification: 5'-phosphorothioate
  modified_base 11: mod_base = OTHER; note = backbone modification: 5'-phosphorothioate
  modified_base 12: mod_base = OTHER; note = backbone modification: 5'-phosphorothioate
  modified_base 13: mod_base = OTHER; note = backbone modification: 5'-phosphorothioate
  modified_base 14: mod_base = OTHER; note = backbone modification: 5'-phosphorothioate
  modified_base 15: mod_base = OTHER; note = backbone modification: 5'-phosphorothioate
  modified_base 16: mod_base = OTHER; note = backbone modification: 5'-phosphorothioate
  modified_base 17: mod_base = OTHER; note = backbone modification: 5'-phosphorothioate
ttcttgtacttcatccca

SEQ ID NO: 839 - RNA, 18 nt, synthetic construct
  source 1..18: mol_type = other RNA; note = Antisense oligonucleotide
  modified_base 1: mod_base = OTHER; note = backbone modification: 5'-phosphorothioate
  modified_base 2: mod_base = OTHER; note = backbone modification: 5'-phosphorothioate
  modified_base 3: mod_base = OTHER; note = backbone modification: 5'-phosphorothioate
  modified_base 4: mod_base = OTHER; note = backbone modification: 5'-phosphorothioate
  modified_base 5: mod_base = OTHER; note = backbone modification: 5'-phosphorothioate
  modified_base 6: mod_base = OTHER; note = backbone modification: 5'-phosphorothioate
  modified_base 7: mod_base = OTHER; note = backbone modification: 5'-phosphorothioate
  modified_base 8: mod_base = OTHER; note = backbone modification: 5'-phosphorothioate
  modified_base 9: mod_base = OTHER; note = backbone modification: 5'-phosphorothioate
  modified_base 10: mod_base = OTHER; note = backbone modification: 5'-phosphorothioate
  modified_base 11: mod_base = OTHER; note = backbone modification: 5'-phosphorothioate
  modified_base 12: mod_base = OTHER; note = backbone modification: 5'-phosphorothioate
  modified_base 13: mod_base = OTHER; note = backbone modification: 5'-phosphorothioate
  modified_base 14: mod_base = OTHER; note = backbone modification: 5'-phosphorothioate
  modified_base 15: mod_base = OTHER; note = backbone modification: 5'-phosphorothioate
  modified_base 16: mod_base = OTHER; note = backbone modification: 5'-phosphorothioate
  modified_base 17: mod_base = OTHER; note = backbone modification: 5'-phosphorothioate
gttcttgtacttcatccc

SEQ ID NO: 840 - RNA, 18 nt, synthetic construct
  source 1..18: mol_type = other RNA; note = Antisense oligonucleotide
  modified_base 1: mod_base = OTHER; note = backbone modification: 5'-phosphorothioate
  modified_base 2: mod_base = OTHER; note = backbone modification: 5'-phosphorothioate
  modified_base 3: mod_base = OTHER; note = backbone modification: 5'-phosphorothioate
  modified_base 4: mod_base = OTHER; note = backbone modification: 5'-phosphorothioate
  modified_base 5: mod_base = OTHER; note = backbone modification: 5'-phosphorothioate
  modified_base 6: mod_base = OTHER; note = backbone modification: 5'-phosphorothioate
  modified_base 7: mod_base = OTHER; note = backbone modification: 5'-phosphorothioate
  modified_base 8: mod_base = OTHER; note = backbone modification: 5'-phosphorothioate
  modified_base 9: mod_base = OTHER; note = backbone modification: 5'-phosphorothioate
  modified_base 10: mod_base = OTHER; note = backbone modification: 5'-phosphorothioate
  modified_base 11: mod_base = OTHER; note = backbone modification: 5'-phosphorothioate
  modified_base 12: mod_base = OTHER; note = backbone modification: 5'-phosphorothioate
  modified_base 13: mod_base = OTHER; note = backbone modification: 5'-phosphorothioate
  modified_base 14: mod_base = OTHER; note = backbone modification: 5'-phosphorothioate
  modified_base 15: mod_base = OTHER; note = backbone modification: 5'-phosphorothioate
  modified_base 16: mod_base = OTHER; note = backbone modification: 5'-phosphorothioate
  modified_base 17: mod_base = OTHER; note = backbone modification: 5'-phosphorothioate
tgttcttgtacttcatcc

SEQ ID NO: 841 - RNA, 18 nt, synthetic construct
  source 1..18: mol_type = other RNA; note = Antisense oligonucleotide
  modified_base 1: mod_base = OTHER; note = sugar modification: lna; note = backbone modification: 5'-phosphorothioate; note = thymine
  modified_base 2: mod_base = OTHER; note = backbone modification: 5'-phosphorothioate; note = sugar modification: lna
  modified_base 3: mod_base = OTHER; note = backbone modification: 5'-phosphorothioate
  modified_base 4: mod_base = OTHER; note = backbone modification: 5'-phosphorothioate
  modified_base 5: mod_base = OTHER; note = backbone modification: 5'-phosphorothioate
  modified_base 6: mod_base = OTHER; note = backbone modification: 5'-phosphorothioate
  modified_base 7: mod_base = OTHER; note = backbone modification: 5'-phosphorothioate
  modified_base 8: mod_base = OTHER; note = backbone modification: 5'-phosphorothioate
  modified_base 9: mod_base = OTHER; note = backbone modification: 5'-phosphorothioate
  modified_base 10: mod_base = OTHER; note = backbone modification: 5'-phosphorothioate
  modified_base 11: mod_base = OTHER; note = backbone modification: 5'-phosphorothioate
  modified_base 12: mod_base = OTHER; note = backbone modification: 5'-phosphorothioate
  modified_base 13: mod_base = OTHER; note = backbone modification: 5'-phosphorothioate
  modified_base 14: mod_base = OTHER; note = backbone modification: 5'-phosphorothioate
  modified_base 15: mod_base = OTHER; note = backbone modification: 5'-phosphorothioate
  modified_base 16: mod_base = OTHER; note = backbone modification: 5'-phosphorothioate
  modified_base 17: mod_base = OTHER; note = sugar modification: lna; note = backbone modification: 5'-phosphorothioate
  modified_base 18: mod_base = OTHER; note = sugar modification: lna
tgttcttgtacttcatcc

SEQ ID NO: 842 - RNA, 18 nt, synthetic construct
  source 1..18: mol_type = other RNA; note = Antisense oligonucleotide
  modified_base 1: mod_base = OTHER; note = backbone modification: 5'-phosphorothioate
  modified_base 2: mod_base = OTHER; note = backbone modification: 5'-phosphorothioate
  modified_base 3: mod_base = OTHER; note = backbone modification: 5'-phosphorothioate
  modified_base 4: mod_base = OTHER; note = backbone modification: 5'-phosphorothioate
  modified_base 5: mod_base = OTHER; note = backbone modification: 5'-phosphorothioate
  modified_base 6: mod_base = OTHER; note = backbone modification: 5'-phosphorothioate
  modified_base 7: mod_base = OTHER; note = backbone modification: 5'-phosphorothioate
  modified_base 8: mod_base = OTHER; note = backbone modification: 5'-phosphorothioate
  modified_base 9: mod_base = OTHER; note = backbone modification: 5'-phosphorothioate
  modified_base 10: mod_base = OTHER; note = backbone modification: 5'-phosphorothioate
  modified_base 11: mod_base = OTHER; note = backbone modification: 5'-phosphorothioate
  modified_base 12: mod_base = OTHER; note = backbone modification: 5'-phosphorothioate
  modified_base 13: mod_base = OTHER; note = backbone modification: 5'-phosphorothioate
  modified_base 14: mod_base = OTHER; note = backbone modification: 5'-phosphorothioate
  modified_base 15: mod_base = OTHER; note = backbone modification: 5'-phosphorothioate
  modified_base 16: mod_base = OTHER; note = backbone modification: 5'-phosphorothioate
  modified_base 17: mod_base = OTHER; note = backbone modification: 5'-phosphorothioate
gtgttcttgtacttcatc

SEQ ID NO: 843 - RNA, 18 nt, synthetic construct
  source 1..18: mol_type = other RNA; note = Antisense oligonucleotide
  modified_base 1: mod_base = OTHER; note = backbone modification: 5'-phosphorothioate; note = sugar modification: lna
  modified_base 2: mod_base = OTHER; note = sugar modification: lna; note = backbone modification: 5'-phosphorothioate; note = thymine
  modified_base 3: mod_base = OTHER; note = backbone modification: 5'-phosphorothioate
  modified_base 4: mod_base = OTHER; note = backbone modification: 5'-phosphorothioate
  modified_base 5: mod_base = OTHER; note = backbone modification: 5'-phosphorothioate
  modified_base 6: mod_base = OTHER; note = backbone modification: 5'-phosphorothioate
  modified_base 7: mod_base = OTHER; note = backbone modification: 5'-phosphorothioate
  modified_base 8: mod_base = OTHER; note = backbone modification: 5'-phosphorothioate
  modified_base 9: mod_base = OTHER; note = backbone modification: 5'-phosphorothioate
  modified_base 10: mod_base = OTHER; note = backbone modification: 5'-phosphorothioate
  modified_base 11: mod_base = OTHER; note = backbone modification: 5'-phosphorothioate
  modified_base 12: mod_base = OTHER; note = backbone modification: 5'-phosphorothioate
  modified_base 13: mod_base = OTHER; note = backbone modification: 5'-phosphorothioate
  modified_base 14: mod_base = OTHER; note = backbone modification: 5'-phosphorothioate
  modified_base 15: mod_base = OTHER; note = backbone modification: 5'-phosphorothioate
  modified_base 16: mod_base = OTHER; note = backbone modification: 5'-phosphorothioate
  modified_base 17: mod_base = OTHER; note = thymine; note = sugar modification: lna; note = backbone modification: 5'-phosphorothioate
  modified_base 18: mod_base = OTHER; note = sugar modification: lna
gtgttcttgtacttcatc

SEQ ID NO: 844 - RNA, 18 nt, synthetic construct
  source 1..18: mol_type = other RNA; note = Antisense oligonucleotide
  modified_base 1: mod_base = OTHER; note = backbone modification: 5'-phosphorothioate
  modified_base 2: mod_base = OTHER; note = backbone modification: 5'-phosphorothioate
  modified_base 3: mod_base = OTHER; note = backbone modification: 5'-phosphorothioate
  modified_base 4: mod_base = OTHER; note = backbone modification: 5'-phosphorothioate
  modified_base 5: mod_base = OTHER; note = backbone modification: 5'-phosphorothioate
  modified_base 6: mod_base = OTHER; note = backbone modification: 5'-phosphorothioate
  modified_base 7: mod_base = OTHER; note = backbone modification: 5'-phosphorothioate
  modified_base 8: mod_base = OTHER; note = backbone modification: 5'-phosphorothioate
  modified_base 9: mod_base = OTHER; note = backbone modification: 5'-phosphorothioate
  modified_base 10: mod_base = OTHER; note = backbone modification: 5'-phosphorothioate
  modified_base 11: mod_base = OTHER; note = backbone modification: 5'-phosphorothioate
  modified_base 12: mod_base = OTHER; note = backbone modification: 5'-phosphorothioate
  modified_base 13: mod_base = OTHER; note = backbone modification: 5'-phosphorothioate
  modified_base 14: mod_base = OTHER; note = backbone modification: 5'-phosphorothioate
  modified_base 15: mod_base = OTHER; note = backbone modification: 5'-phosphorothioate
  modified_base 16: mod_base = OTHER; note = backbone modification: 5'-phosphorothioate
  modified_base 17: mod_base = OTHER; note = backbone modification: 5'-phosphorothioate
ggtgttcttgtacttcat

SEQ ID NO: 845 - RNA, 18 nt, synthetic construct
  source 1..18: mol_type = other RNA; note = Antisense oligonucleotide
  modified_base 1: mod_base = OTHER; note = backbone modification: 5'-phosphorothioate
  modified_base 2: mod_base = OTHER; note = backbone modification: 5'-phosphorothioate
  modified_base 3: mod_base = OTHER; note = backbone modification: 5'-phosphorothioate
  modified_base 4: mod_base = OTHER; note = backbone modification: 5'-phosphorothioate
  modified_base 5: mod_base = OTHER; note = backbone modification: 5'-phosphorothioate
  modified_base 6: mod_base = OTHER; note = backbone modification: 5'-phosphorothioate
  modified_base 7: mod_base = OTHER; note = backbone modification: 5'-phosphorothioate
  modified_base 8: mod_base = OTHER; note = backbone modification: 5'-phosphorothioate
  modified_base 9: mod_base = OTHER; note = backbone modification: 5'-phosphorothioate
  modified_base 10: mod_base = OTHER; note = backbone modification: 5'-phosphorothioate
  modified_base 11: mod_base = OTHER; note = backbone modification: 5'-phosphorothioate
  modified_base 12: mod_base = OTHER; note = backbone modification: 5'-phosphorothioate
  modified_base 13: mod_base = OTHER; note = backbone modification: 5'-phosphorothioate
  modified_base 14: mod_base = OTHER; note = backbone modification: 5'-phosphorothioate
  modified_base 15: mod_base = OTHER; note = backbone modification: 5'-phosphorothioate
  modified_base 16: mod_base = OTHER; note = backbone modification: 5'-phosphorothioate
  modified_base 17: mod_base = OTHER; note = backbone modification: 5'-phosphorothioate
aggtgttcttgtacttca

SEQ ID NO: 846 - RNA, 18 nt, synthetic construct
  source 1..18: mol_type = other RNA; note = Antisense oligonucleotide
  modified_base 1: mod_base = OTHER; note = backbone modification: 5'-phosphorothioate
  modified_base 2: mod_base = OTHER; note = backbone modification: 5'-phosphorothioate
  modified_base 3: mod_base = OTHER; note = backbone modification: 5'-phosphorothioate
  modified_base 4: mod_base = OTHER; note = backbone modification: 5'-phosphorothioate
  modified_base 5: mod_base = OTHER; note = backbone modification: 5'-phosphorothioate
  modified_base 6: mod_base = OTHER; note = backbone modification: 5'-phosphorothioate
  modified_base 7: mod_base = OTHER; note = backbone modification: 5'-phosphorothioate
  modified_base 8: mod_base = OTHER; note = backbone modification: 5'-phosphorothioate
  modified_base 9: mod_base = OTHER; note = backbone modification: 5'-phosphorothioate
  modified_base 10: mod_base = OTHER; note = backbone modification: 5'-phosphorothioate
  modified_base 11: mod_base = OTHER; note = backbone modification: 5'-phosphorothioate
  modified_base 12: mod_base = OTHER; note = backbone modification: 5'-phosphorothioate
  modified_base 13: mod_base = OTHER; note = backbone modification: 5'-phosphorothioate
  modified_base 14: mod_base = OTHER; note = backbone modification: 5'-phosphorothioate
  modified_base 15: mod_base = OTHER; note = backbone modification: 5'-phosphorothioate
  modified_base 16: mod_base = OTHER; note = backbone modification: 5'-phosphorothioate
  modified_base 17: mod_base = OTHER; note = backbone modification: 5'-phosphorothioate
agccattgtgttgaatcc

SEQ ID NO: 847 - RNA, 18 nt, synthetic construct
  source 1..18: mol_type = other RNA; note = Antisense oligonucleotide
  modified_base 1: mod_base = OTHER; note = thymine; note = backbone modification: 5'-phosphorothioate; note = sugar modification: lna
  modified_base 2: mod_base = OTHER; note = sugar modification: lna; note = backbone modification: 5'-phosphorothioate
  modified_base 3: mod_base = OTHER; note = backbone modification: 5'-phosphorothioate; note = thymine
  modified_base 4: mod_base = OTHER; note = thymine; note = backbone modification: 5'-phosphorothioate
  modified_base 5: mod_base = OTHER; mod_base = m5c; note = backbone modification: 5'-phosphorothioate
  modified_base 6: mod_base = OTHER; note = thymine; note = backbone modification: 5'-phosphorothioate
  modified_base 7: mod_base = OTHER; note = backbone modification: 5'-phosphorothioate; note = thymine
  modified_base 8: mod_base = OTHER; note = backbone modification: 5'-phosphorothioate
  modified_base 9: mod_base = OTHER; note = backbone modification: 5'-phosphorothioate; note = thymine
  modified_base 10: mod_base = OTHER; note = backbone modification: 5'-phosphorothioate
  modified_base 11: mod_base = m5c; mod_base = OTHER; note = backbone modification: 5'-phosphorothioate
  modified_base 12: mod_base = OTHER; note = thymine; note = backbone modification: 5'-phosphorothioate
  modified_base 13: mod_base = OTHER; note = backbone modification: 5'-phosphorothioate; note = thymine
  modified_base 14: mod_base = m5c; mod_base = OTHER; note = backbone modification: 5'-phosphorothioate
  modified_base 15: mod_base = OTHER; note = backbone modification: 5'-phosphorothioate
  modified_base 16: mod_base = OTHER; note = thymine; note = backbone modification: 5'-phosphorothioate
  modified_base 17: mod_base = OTHER; mod_base = m5c; note = backbone modification: 5'-phosphorothioate; note = sugar modification: lna
  modified_base 18: mod_base = m5c; mod_base = OTHER; note = sugar modification: lna
tgttcttgtacttcatcc

SEQ ID NO: 848 - RNA, 18 nt, synthetic construct
  source 1..18: mol_type = other RNA; note = Antisense oligonucleotide
  modified_base 1: mod_base = OTHER; note = backbone modification: 5'-phosphorothioate; note = sugar modification: lna
  modified_base 2: mod_base = OTHER; note = sugar modification: lna; note = backbone modification: 5'-phosphorothioate; note = thymine
  modified_base 3: mod_base = OTHER; note = backbone modification: 5'-phosphorothioate
  modified_base 4: mod_base = OTHER; note = backbone modification: 5'-phosphorothioate; note = thymine
  modified_base 5: mod_base = OTHER; note = thymine; note = backbone modification: 5'-phosphorothioate
  modified_base 6: mod_base = OTHER; mod_base = m5c; note = backbone modification: 5'-phosphorothioate
  modified_base 7: mod_base = OTHER; note = thymine; note = backbone modification: 5'-phosphorothioate
  modified_base 8: mod_base = OTHER; note = thymine; note = backbone modification: 5'-phosphorothioate
  modified_base 9: mod_base = OTHER; note = backbone modification: 5'-phosphorothioate
  modified_base 10: mod_base = OTHER; note = thymine; note = backbone modification: 5'-phosphorothioate
  modified_base 11: mod_base = OTHER; note = backbone modification: 5'-phosphorothioate
  modified_base 12: mod_base = m5c; mod_base = OTHER; note = backbone modification: 5'-phosphorothioate
  modified_base 13: mod_base = OTHER; note = backbone modification: 5'-phosphorothioate; note = thymine
  modified_base 14: mod_base = OTHER; note = thymine; note = backbone modification: 5'-phosphorothioate
  modified_base 15: mod_base = m5c; mod_base = OTHER; note = backbone modification: 5'-phosphorothioate
  modified_base 16: mod_base = OTHER; note = backbone modification: 5'-phosphorothioate
  modified_base 17: mod_base = OTHER; note = thymine; note = backbone modification: 5'-phosphorothioate; note = sugar modification: lna
  modified_base 18: mod_base = m5c; mod_base = OTHER; note = sugar modification: lna
gtgttcttgtacttcatc

SEQ ID NO: 849 - RNA, 18 nt, synthetic construct
  source 1..18: mol_type = other RNA; note = Antisense oligonucleotide
  modified_base 1: mod_base = OTHER; note = thymine; note = backbone modification: 5'-phosphorothioate; note = sugar modification: 2'-O-methoxyethylribose
  modified_base 2: mod_base = OTHER; note = backbone modification: 5'-phosphorothioate; note = sugar modification: 2'-O-methoxyethylribose
  modified_base 3: mod_base = OTHER; note = backbone modification: 5'-phosphorothioate; note = thymine; note = sugar modification: 2'-O-methoxyethylribose
  modified_base 4: mod_base = OTHER; note = sugar modification: 2-fluororibose; note = backbone modification: 5'-phosphorothioate
  modified_base 5: mod_base = OTHER; note = sugar modification: 2-fluororibose; note = backbone modification: 5'-phosphorothioate
  modified_base 6: mod_base = OTHER; note = backbone modification: 5'-phosphorothioate; note = sugar modification: 2-fluororibose
  modified_base 7: mod_base = OTHER; note = backbone modification: 5'-phosphorothioate; note = sugar modification: 2-fluororibose
  modified_base 8: mod_base = OTHER; note = sugar modification: 2-fluororibose; note = backbone modification: 5'-phosphorothioate
  modified_base 9: mod_base = OTHER; note = backbone modification: 5'-phosphorothioate; note = sugar modification: 2-fluororibose
  modified_base 10: mod_base = OTHER; note = sugar modification: 2-fluororibose; note = backbone modification: 5'-phosphorothioate
  modified_base 11: mod_base = OTHER; note = sugar modification: 2-fluororibose; note = backbone modification: 5'-phosphorothioate
  modified_base 12: mod_base = OTHER; note = sugar modification: 2-fluororibose; note = backbone modification: 5'-phosphorothioate
  modified_base 13: mod_base = OTHER; note = sugar modification: 2-fluororibose; note = backbone modification: 5'-phosphorothioate
  modified_base 14: mod_base = OTHER; note = backbone modification: 5'-phosphorothioate; note = sugar modification: 2-fluororibose
  modified_base 15: mod_base = OTHER; note = sugar modification: 2-fluororibose; note = backbone modification: 5'-phosphorothioate
  modified_base 16: mod_base = OTHER; note = sugar modification: 2'-O-methoxyethylribose; note = backbone modification: 5'-phosphorothioate; note = thymine
  modified_base 17: mod_base = OTHER; mod_base = m5c; note = sugar modification: 2'-O-methoxyethylribose; note = backbone modification: 5'-phosphorothioate
  modified_base 18: mod_base = OTHER; mod_base = m5c; note = sugar modification: 2'-O-methoxyethylribose
tgttcttgtacttcatcc

SEQ ID NO: 850 - RNA, 15 nt, synthetic construct
  source 1..15: mol_type = other RNA; note = Antisense oligonucleotide
  modified_base 1: mod_base = OTHER; note = sugar modification: 2'-O-methoxyethylribose; note = thymine; note = backbone modification: 5'-phosphorothioate
  modified_base 2: mod_base = OTHER; note = backbone modification: 5'-phosphorothioate; note = sugar modification: 2'-O-methoxyethylribose
  modified_base 3: mod_base = OTHER; note = thymine; note = sugar modification: 2'-O-methoxyethylribose; note = backbone modification: 5'-phosphorothioate
  modified_base 4: mod_base = OTHER; note = thymine; note = backbone modification: 5'-phosphorothioate; note = sugar modification: 2'-O-methoxyethylribose
  modified_base 5: mod_base = m5c; mod_base = OTHER; note = sugar modification: 2'-O-methoxyethylribose; note = backbone modification: 5'-phosphorothioate
  modified_base 6: mod_base = OTHER; note = thymine; note = sugar modification: 2'-O-methoxyethylribose; note = backbone modification: 5'-phosphorothioate
  modified_base 7: mod_base = OTHER; note = thymine; note = backbone modification: 5'-phosphorothioate; note = sugar modification: 2'-O-methoxyethylribose
  modified_base 8: mod_base = OTHER; note = sugar modification: 2'-O-methoxyethylribose; note = backbone modification: 5'-phosphorothioate
  modified_base 9: mod_base = OTHER; note = thymine; note = backbone modification: 5'-phosphorothioate; note = sugar modification: 2'-O-methoxyethylribose
  modified_base 10: mod_base = OTHER; note = sugar modification: 2'-O-methoxyethylribose; note = backbone modification: 5'-phosphorothioate
  modified_base 11: mod_base = OTHER; mod_base = m5c; note = backbone modification: 5'-phosphorothioate; note = sugar modification: 2'-O-methoxyethylribose
  modified_base 12: mod_base = OTHER; note = thymine; note = sugar modification: 2'-O-methoxyethylribose; note = backbone modification: 5'-phosphorothioate
  modified_base 13: mod_base = OTHER; note = sugar modification: 2'-O-methoxyethylribose; note = backbone modification: 5'-phosphorothioate; note = thymine
  modified_base 14: mod_base = OTHER; mod_base = m5c; note = sugar modification: 2'-O-methoxyethylribose; note = backbone modification: 5'-phosphorothioate
  modified_base 15: mod_base = OTHER; note = sugar modification: lna
tgttcttgtacttca

SEQ ID NO: 851 - RNA, 15 nt, synthetic construct
  source 1..15: mol_type = other RNA; note = Antisense oligonucleotide
  modified_base 1: mod_base = OTHER; note = sugar modification: 2'-O-methoxyethylribose; note = backbone modification: 5'-phosphorothioate
  modified_base 2: mod_base = OTHER; note = backbone modification: 5'-phosphorothioate; note = sugar modification: 2'-O-methoxyethylribose; note = thymine
  modified_base 3: mod_base = OTHER; note = backbone modification: 5'-phosphorothioate; note = sugar modification: 2'-O-methoxyethylribose
  modified_base 4: mod_base = OTHER; note = backbone modification: 5'-phosphorothioate; note = sugar modification: 2'-O-methoxyethylribose; note = thymine
  modified_base 5: mod_base = OTHER; note = backbone modification: 5'-phosphorothioate; note = sugar modification: 2'-O-methoxyethylribose; note = thymine
  modified_base 6: mod_base = OTHER; mod_base = m5c; note = backbone modification: 5'-phosphorothioate; note = sugar modification: 2'-O-methoxyethylribose
  modified_base 7: mod_base = OTHER; note = thymine; note = sugar modification: 2'-O-methoxyethylribose; note = backbone modification: 5'-phosphorothioate
  modified_base 8: mod_base = OTHER; note = backbone modification: 5'-phosphorothioate; note = sugar modification: 2'-O-methoxyethylribose; note = thymine
  modified_base 9: mod_base = OTHER; note = backbone modification: 5'-phosphorothioate; note = sugar modification: 2'-O-methoxyethylribose
  modified_base 10: mod_base = OTHER; note = thymine; note = sugar modification: 2'-O-methoxyethylribose; note = backbone modification: 5'-phosphorothioate
  modified_base 11: mod_base = OTHER; note = backbone modification: 5'-phosphorothioate; note = sugar modification: 2'-O-methoxyethylribose
  modified_base 12: mod_base = m5c; mod_base = OTHER; note = sugar modification: 2'-O-methoxyethylribose; note = backbone modification: 5'-phosphorothioate
  modified_base 13: mod_base = OTHER; note = sugar modification: 2'-O-methoxyethylribose; note = backbone modification: 5'-phosphorothioate; note = thymine
  modified_base 14: mod_base = OTHER; note = sugar modification: lna; note = backbone modification: 5'-phosphorothioate; note = thymine
  modified_base 15: mod_base = OTHER; mod_base = m5c; note = sugar modification: lna
gtgttcttgtacttc

SEQ ID NO: 852 - RNA, 16 nt, synthetic construct
  source 1..16: mol_type = other RNA; note = Antisense oligonucleotide
  modified_base 1: mod_base = OTHER; note = sugar modification: lna; note = backbone modification: 5'-phosphorothioate
  modified_base 2: mod_base = OTHER; note = backbone modification: 5'-phosphorothioate; note = sugar modification: 2'-O-methoxyethylribose; note = thymine
  modified_base 3: mod_base = OTHER; note = sugar modification: 2'-O-methoxyethylribose; note = thymine; note = backbone modification: 5'-phosphorothioate
  modified_base 4: mod_base = OTHER; mod_base = m5c; note = backbone modification: 5'-phosphorothioate; note = sugar modification: 2'-O-methoxyethylribose
  modified_base 5: mod_base = OTHER; note = thymine; note = backbone modification: 5'-phosphorothioate; note = sugar modification: 2'-O-methoxyethylribose
  modified_base 6: mod_base = OTHER; note = thymine; note = backbone modification: 5'-phosphorothioate; note = sugar modification: 2'-O-methoxyethylribose
  modified_base 7: mod_base = OTHER; note = backbone modification: 5'-phosphorothioate; note = sugar modification: 2'-O-methoxyethylribose
  modified_base 8: mod_base = OTHER; note = sugar modification: 2'-O-methoxyethylribose; note = thymine; note = backbone modification: 5'-phosphorothioate
  modified_base 9: mod_base = OTHER; note = backbone modification: 5'-phosphorothioate; note = sugar modification: 2'-O-methoxyethylribose
  modified_base 10: mod_base = m5c; mod_base = OTHER; note = sugar modification: 2'-O-methoxyethylribose; note = backbone modification: 5'-phosphorothioate
  modified_base 11: mod_base = OTHER; note = backbone modification: 5'-phosphorothioate; note = sugar modification: 2'-O-methoxyethylribose; note = thymine
  modified_base 12: mod_base = OTHER; note = backbone modification: 5'-phosphorothioate; note = thymine; note = sugar modification: 2'-O-methoxyethylribose
  modified_base 13: mod_base = m5c; mod_base = OTHER; note = backbone modification: 5'-phosphorothioate; note = sugar modification: 2'-O-methoxyethylribose
  modified_base 14: mod_base = OTHER; note = sugar modification: 2'-O-methoxyethylribose; note = backbone modification: 5'-phosphorothioate
  modified_base 15: mod_base = OTHER; note = thymine; note = backbone modification: 5'-phosphorothioate; note = sugar modification: 2'-O-methoxyethylribose
  modified_base 16: mod_base = m5c; mod_base = OTHER; note = sugar modification: lna
gttcttgtacttcatc

SEQ ID NO: 853 - RNA, 16 nt, synthetic construct
  source 1..16: mol_type = other RNA; note = Antisense oligonucleotide
  modified_base 1: mod_base = OTHER; note = backbone modification: 5'-phosphorothioate; note = sugar modification: lna
  modified_base 2: mod_base = OTHER; note = thymine; note = backbone modification: 5'-phosphorothioate; note = sugar modification: 2'-O-methoxyethylribose
  modified_base 3: mod_base = OTHER; note = backbone modification: 5'-phosphorothioate; note = sugar modification: 2'-O-methoxyethylribose
  modified_base 4: mod_base = OTHER; note = sugar modification: 2'-O-methoxyethylribose; note = thymine; note = backbone modification: 5'-phosphorothioate
  modified_base 5: mod_base = OTHER; note = thymine; note = sugar modification: 2'-O-methoxyethylribose; note = backbone modification: 5'-phosphorothioate
  modified_base 6: mod_base = m5c; mod_base = OTHER; note = backbone modification: 5'-phosphorothioate; note = sugar modification: 2'-O-methoxyethylribose
  modified_base 7: mod_base = OTHER; note = thymine; note = sugar modification: 2'-O-methoxyethylribose; note = backbone modification: 5'-phosphorothioate
  modified_base 8: mod_base = OTHER; note = backbone modification: 5'-phosphorothioate; note = sugar modification: 2'-O-methoxyethylribose; note = thymine
  modified_base 9: mod_base = OTHER; note = backbone modification: 5'-phosphorothioate; note = sugar modification: 2'-O-methoxyethylribose
  modified_base 10: mod_base = OTHER; note = thymine; note = backbone modification: 5'-phosphorothioate; note = sugar modification: 2'-O-methoxyethylribose
  modified_base 11: mod_base = OTHER; note = backbone modification: 5'-phosphorothioate; note = sugar modification: 2'-O-methoxyethylribose
  modified_base 12: mod_base = OTHER; mod_base = m5c; note = backbone modification: 5'-phosphorothioate; note = sugar modification: 2'-O-methoxyethylribose
  modified_base 13: mod_base = OTHER; note = thymine; note = backbone modification: 5'-phosphorothioate; note = sugar modification: 2'-O-methoxyethylribose
  modified_base 14: mod_base = OTHER; note = thymine; note = backbone modification: 5'-phosphorothioate; note = sugar modification: 2'-O-methoxyethylribose
  modified_base 15: mod_base = OTHER; mod_base = m5c; note = sugar modification: 2'-O-methoxyethylribose; note = backbone modification: 5'-phosphorothioate
  modified_base 16: mod_base = OTHER; note = sugar modification: lna
gtgttcttgtacttca

SEQ ID NO: 854 - RNA, 18 nt, synthetic construct
  source 1..18: mol_type = other RNA; note = Antisense oligonucleotide
  modified_base 1: mod_base = OTHER; note = sugar modification: 2'-O-methoxyethylribose; note = thymine; note = backbone modification: 5'-phosphorothioate
  modified_base 2: mod_base = OTHER; note = sugar modification: 2'-O-methoxyethylribose; note = backbone modification: 5'-phosphorothioate
  modified_base 3: mod_base = OTHER; note = thymine; note = backbone modification: 5'-phosphorothioate; note = sugar modification: 2-fluororibose
  modified_base 4: mod_base = OTHER; note = thymine; note = backbone modification: 5'-phosphorothioate; note = sugar modification: 2-fluororibose
  modified_base 5: mod_base = OTHER; mod_base = m5c; note = sugar modification: 2-fluororibose; note = backbone modification: 5'-phosphorothioate
  modified_base 6: mod_base = OTHER; note = thymine; note = backbone modification: 5'-phosphorothioate; note = sugar modification: 2-fluororibose
  modified_base 7: mod_base = OTHER; note = sugar modification: 2-fluororibose; note = backbone modification: 5'-phosphorothioate; note = thymine
  modified_base 8: mod_base = OTHER; note = sugar modification: 2-fluororibose; note = backbone modification: 5'-phosphorothioate
  modified_base 9: mod_base = OTHER; note = thymine; note = sugar modification: 2'-O-methoxyethylribose; note = backbone modification: 5'-phosphorothioate
  modified_base 10: mod_base = OTHER; note = sugar modification: 2'-O-methoxyethylribose; note = backbone modification: 5'-phosphorothioate
  modified_base 11: mod_base = OTHER; mod_base = m5c; note = backbone modification: 5'-phosphorothioate; note = sugar modification: 2-fluororibose
  modified_base 12: mod_base = OTHER; note = backbone modification: 5'-phosphorothioate; note = thymine; note = sugar modification: 2-fluororibose
  modified_base 13: mod_base = OTHER; note = sugar modification: 2-fluororibose; note = backbone modification: 5'-phosphorothioate; note = thymine
  modified_base 14: mod_base = OTHER; mod_base = m5c; note = backbone modification: 5'-phosphorothioate; note = sugar modification: 2-fluororibose
  modified_base 15: mod_base = OTHER; note = sugar modification: 2-fluororibose; note = backbone modification: 5'-phosphorothioate
  modified_base 16: mod_base = OTHER; note = sugar modification: 2-fluororibose; note = thymine; note = backbone modification: 5'-phosphorothioate
  modified_base 17: mod_base = m5c; mod_base = OTHER; note = backbone modification: 5'-phosphorothioate; note = sugar modification: 2'-O-methoxyethylribose
  modified_base 18: mod_base = m5c; mod_base = OTHER; note = sugar modification: 2'-O-methoxyethylribose
tgttcttgtacttcatcc

SEQ ID NO: 855 - RNA, 18 nt, synthetic construct
  source 1..18: mol_type = other RNA; note = Antisense oligonucleotide
  modified_base 1: mod_base = OTHER; note = backbone modification: 5'-phosphorothioate; note = sugar modification: lna; note = thymine
  modified_base 2: mod_base = OTHER; note = sugar modification: 2'-O-methoxyethylribose; note = backbone modification: 5'-phosphorothioate
  modified_base 3: mod_base = OTHER; note = sugar modification: 2'-O-methoxyethylribose; note = backbone modification: 5'-phosphorothioate; note = thymine
  modified_base 4: mod_base = OTHER; note = backbone modification: 5'-phosphorothioate; note = thymine; note = sugar modification: 2-fluororibose
  modified_base 5: mod_base = OTHER; mod_base = m5c; note = backbone modification: 5'-phosphorothioate; note = sugar modification: 2-fluororibose
  modified_base 6: mod_base = OTHER; note = backbone modification: 5'-phosphorothioate; note = thymine; note = sugar modification: 2-fluororibose
  modified_base 7: mod_base = OTHER; note = backbone modification: 5'-phosphorothioate; note = thymine; note = sugar modification: 2-fluororibose
  modified_base 8: mod_base = OTHER; note = sugar modification: 2'-O-methoxyethylribose; note = backbone modification: 5'-phosphorothioate
  modified_base 9: mod_base = OTHER; note = backbone modification: 5'-phosphorothioate; note = sugar modification: 2'-O-methoxyethylribose; note = thymine
  modified_base 10: mod_base = OTHER; note = sugar modification: 2'-O-methoxyethylribose; note = backbone modification: 5'-phosphorothioate
  modified_base 11: mod_base = m5c; mod_base = OTHER; note = sugar modification: 2'-O-methoxyethylribose; note = backbone modification: 5'-phosphorothioate
  modified_base 12: mod_base = OTHER; note = thymine; note = backbone modification: 5'-phosphorothioate; note = sugar modification: 2-fluororibose
  modified_base 13: mod_base = OTHER; note = sugar modification: 2-fluororibose; note = thymine; note = backbone modification: 5'-phosphorothioate
  modified_base 14: mod_base = m5c; mod_base = OTHER; note = sugar modification: 2-fluororibose; note = backbone modification: 5'-phosphorothioate
  modified_base 15: mod_base = OTHER; note = backbone modification: 5'-phosphorothioate; note = sugar modification: 2-fluororibose
  modified_base 16: mod_base = OTHER; note = thymine; note = sugar modification: 2'-O-methoxyethylribose; note = backbone modification: 5'-phosphorothioate
  modified_base 17: mod_base = OTHER; mod_base = m5c; note = sugar modification: 2'-O-methoxyethylribose; note = backbone modification: 5'-phosphorothioate
  modified_base 18: mod_base = m5c; mod_base = OTHER; note = sugar modification: lna
tgttcttgtacttcatcc

SEQ ID NO: 856 - RNA, 18 nt, synthetic construct
  source 1..18: mol_type = other RNA; note = Antisense oligonucleotide
  modified_base 1: mod_base = OTHER; note = backbone modification: 5'-phosphorothioate; note = thymine; note = sugar modification: lna
  modified_base 2: mod_base = OTHER; note = sugar modification: 2-fluororibose; note = backbone modification: 5'-phosphorothioate
  modified_base 3: mod_base = OTHER; note = thymine; note = sugar modification: 2-fluororibose; note = backbone modification: 5'-phosphorothioate
  modified_base 4: mod_base = OTHER; note = backbone modification: 5'-phosphorothioate; note = thymine; note = sugar modification: 2-fluororibose
  modified_base 5: mod_base = m5c; mod_base = OTHER; note = sugar modification: 2-fluororibose; note = backbone modification: 5'-phosphorothioate
  modified_base 6: mod_base = OTHER; note = thymine; note = backbone modification: 5'-phosphorothioate; note = sugar modification: 2-fluororibose
  modified_base 7: mod_base = OTHER; note = thymine; note = backbone modification: 5'-phosphorothioate; note = sugar modification: 2-fluororibose
  modified_base 8: mod_base = OTHER; note = backbone modification: 5'-phosphorothioate; note = sugar modification: 2-fluororibose
  modified_base 9: mod_base = OTHER; note = backbone modification: 5'-phosphorothioate; note = sugar modification: 2-fluororibose; note = thymine
  modified_base 10: mod_base = OTHER; note = sugar modification: 2-fluororibose; note = backbone modification: 5'-phosphorothioate
  modified_base 11: mod_base = OTHER; mod_base = m5c; note = sugar modification: 2-fluororibose; note = backbone modification: 5'-phosphorothioate
  modified_base 12: mod_base = OTHER; note = backbone modification: 5'-phosphorothioate; note = sugar modification: 2-fluororibose; note = thymine
  modified_base 13: mod_base = OTHER; note = backbone modification: 5'-phosphorothioate; note = thymine; note = sugar modification: 2-fluororibose
  modified_base 14: mod_base = OTHER; mod_base = m5c; note = sugar modification: 2-fluororibose; note = backbone modification: 5'-phosphorothioate
  modified_base 15: mod_base = OTHER; note = backbone modification: 5'-phosphorothioate; note = sugar modification: 2-fluororibose
  modified_base 16: mod_base = OTHER; note = sugar modification: 2-fluororibose; note = thymine; note = backbone modification: 5'-phosphorothioate
  modified_base 17: mod_base = OTHER; mod_base = m5c; note = backbone modification: 5'-phosphorothioate; note = sugar modification: 2-fluororibose
  modified_base 18: mod_base = m5c; mod_base = OTHER; note = sugar modification: lna
tgttcttgtacttcatcc

SEQ ID NO: 857 - RNA, 18 nt, synthetic construct
  source 1..18: mol_type = other RNA; note = Antisense oligonucleotide
  modified_base 1: mod_base = OTHER; note = thymine; note = sugar modification: lna; note = backbone modification: 5'-phosphorothioate
  modified_base 2: mod_base = OTHER; note = sugar modification: lna; note = backbone modification: 5'-phosphorothioate
  modified_base 3: mod_base = OTHER; note = sugar modification: 2'-O-methoxyethylribose; note = thymine; note = backbone modification: 5'-phosphorothioate
  modified_base 4: mod_base = OTHER; note = backbone modification: 5'-phosphorothioate; note = thymine; note = sugar modification: 2-fluororibose
  modified_base 5: mod_base = m5c; mod_base = OTHER; note = backbone modification: 5'-phosphorothioate; note = sugar modification: 2-fluororibose
  modified_base 6: mod_base = OTHER; note = thymine; note = backbone modification: 5'-phosphorothioate; note = sugar modification: 2-fluororibose
  modified_base 7: mod_base = OTHER; note = backbone modification: 5'-phosphorothioate; note = sugar modification: 2-fluororibose; note = thymine
  modified_base 8: mod_base = OTHER; note = sugar modification: 2-fluororibose; note = backbone modification: 5'-phosphorothioate
  modified_base 9: mod_base = OTHER; note = thymine; note = sugar modification: 2-fluororibose; note = backbone modification: 5'-phosphorothioate
  modified_base 10: mod_base = OTHER; note = backbone modification: 5'-phosphorothioate; note = sugar modification: 2-fluororibose
  modified_base 11: mod_base = OTHER; mod_base = m5c; note = sugar modification: 2-fluororibose; note = backbone modification: 5'-phosphorothioate
  modified_base 12: mod_base = OTHER; note = backbone modification: 5'-phosphorothioate; note = thymine; note = sugar modification: 2-fluororibose
  modified_base 13: mod_base = OTHER; note = sugar modification: 2-fluororibose; note = thymine; note = backbone modification: 5'-phosphorothioate
  modified_base 14: mod_base = m5c; mod_base = OTHER; note = sugar modification: 2-fluororibose; note = backbone modification: 5'-phosphorothioate
  modified_base 15: mod_base = OTHER; note = backbone modification: 5'-phosphorothioate; note = sugar modification: 2-fluororibose
  modified_base 16: mod_base = OTHER; note = backbone modification: 5'-phosphorothioate; note = thymine; note = sugar modification: 2'-O-methoxyethylribose
  modified_base 17: mod_base = OTHER; mod_base = m5c; note = backbone modification: 5'-phosphorothioate; note = sugar modification: lna
  modified_base 18: mod_base = OTHER; mod_base = m5c; note = sugar modification: lna
tgttcttgtacttcatcc

SEQ ID NO: 858 - RNA, 15 nt, synthetic construct
  source 1..15: mol_type = other RNA; note = Antisense oligonucleotide
  modified_base 1: mod_base = OTHER; note = backbone modification: 5'-phosphorothioate; note = sugar modification: lna
  modified_base 2: mod_base = OTHER; note = backbone modification: 5'-phosphorothioate; note = sugar modification: lna
  modified_base 3: mod_base = OTHER; note = sugar modification: 2'-O-methoxyethylribose; note = thymine; note = backbone modification: 5'-phosphorothioate
  modified_base 4: mod_base = OTHER; note = backbone modification: 5'-phosphorothioate; note = thymine; note = sugar modification: 2'-O-methoxyethylribose
  modified_base 5: mod_base = m5c; mod_base = OTHER; note = backbone modification: 5'-phosphorothioate; note = sugar modification: 2'-O-methoxyethylribose
  modified_base 6: mod_base = OTHER; note = backbone modification: 5'-phosphorothioate; note = sugar modification: 2'-O-methoxyethylribose; note = thymine
  modified_base 7: mod_base = OTHER; note = thymine; note = sugar modification: 2'-O-methoxyethylribose; note = backbone modification: 5'-phosphorothioate
  modified_base 8: mod_base = OTHER; note = sugar modification: 2'-O-methoxyethylribose; note = backbone modification: 5'-phosphorothioate; note = thymine
  modified_base 9: mod_base = OTHER; mod_base = m5c; note = sugar modification: 2'-O-methoxyethylribose; note = backbone modification: 5'-phosphorothioate
  modified_base 10: mod_base = OTHER; note = backbone modification: 5'-phosphorothioate; note = sugar modification: 2'-O-methoxyethylribose
  modified_base 11: mod_base = OTHER; note = sugar modification: 2'-O-methoxyethylribose; note = backbone modification: 5'-phosphorothioate
  modified_base 12: mod_base = m5c; mod_base = OTHER; note = sugar modification: 2'-O-methoxyethylribose; note = backbone modification: 5'-phosphorothioate
  modified_base 13: mod_base = OTHER; note = sugar modification: 2'-O-methoxyethylribose; note = thymine; note = backbone modification: 5'-phosphorothioate
  modified_base 14: mod_base = OTHER; note = sugar modification: 2'-O-methoxyethylribose; note = backbone modification: 5'-phosphorothioate
  modified_base 15: mod_base = OTHER; note = sugar modification: 2'-O-methoxyethylribose
aattctttcaactag

SEQ ID NO: 859 - RNA, 16 nt, synthetic construct
  source 1..16: mol_type = other RNA; note = Antisense oligonucleotide
  modified_base 1: mod_base = OTHER; note = thymine; note = sugar modification: lna; note = backbone modification: 5'-phosphorothioate
  modified_base 2: mod_base = m5c; mod_base = OTHER; note = sugar modification: 2'-O-methoxyethylribose; note = backbone modification: 5'-phosphorothioate
  modified_base 3: mod_base = OTHER; note = backbone modification: 5'-phosphorothioate; note = sugar modification: 2'-O-methoxyethylribose; note = thymine
  modified_base 4: mod_base = OTHER; note = sugar modification: 2'-O-methoxyethylribose; note = backbone modification: 5'-phosphorothioate
  modified_base 5: mod_base = OTHER; note = sugar modification: 2'-O-methoxyethylribose; note = backbone modification: 5'-phosphorothioate
  modified_base 6: mod_base = OTHER; note = backbone modification: 5'-phosphorothioate; note = sugar modification: 2'-O-methoxyethylribose
  modified_base 7: mod_base = OTHER; note = backbone modification: 5'-phosphorothioate; note = thymine; note = sugar modification: 2'-O-methoxyethylribose
  modified_base 8: mod_base = OTHER; note = backbone modification: 5'-phosphorothioate; note = sugar modification: 2'-O-methoxyethylribose; note = thymine
  modified_base 9: mod_base = m5c; mod_base = OTHER; note = backbone modification: 5'-phosphorothioate; note = sugar modification: 2'-O-methoxyethylribose
  modified_base 10: mod_base = OTHER; note = thymine; note = backbone modification: 5'-phosphorothioate; note = sugar modification: 2'-O-methoxyethylribose
  modified_base 11: mod_base = OTHER; note = sugar modification: 2'-O-methoxyethylribose; note = backbone modification: 5'-phosphorothioate; note = thymine
  modified_base 12: mod_base = OTHER; note = sugar modification: 2'-O-methoxyethylribose; note = backbone modification: 5'-phosphorothioate; note = thymine
  modified_base 13: mod_base = m5c; mod_base = OTHER; note = sugar modification: 2'-O-methoxyethylribose; note = backbone modification: 5'-phosphorothioate
  modified_base 14: mod_base = OTHER; note = sugar modification: 2'-O-methoxyethylribose; note = backbone modification: 5'-phosphorothioate
  modified_base 15: mod_base = OTHER; note = backbone modification: 5'-phosphorothioate; note = sugar modification: 2'-O-methoxyethylribose
  modified_base 16: mod_base = OTHER; mod_base = m5c; note = sugar modification: lna
tctgaattctttcaac

SEQ ID NO: 860 - RNA, 18 nt, synthetic construct
  source 1..18: mol_type = other RNA; note = Antisense oligonucleotide
  modified_base 1: mod_base = OTHER; note = thymine; note = sugar modification: lna; note = backbone modification: 5'-phosphorothioate
  modified_base 2: mod_base = OTHER; note = sugar modification: 2'-O-methoxyethylribose; note = backbone modification: 5'-phosphorothioate
  modified_base 3: mod_base = OTHER; note = thymine; note = backbone modification: 5'-phosphorothioate; note = sugar modification: 2'-O-methoxyethylribose
  modified_base 4: mod_base = OTHER; note = sugar modification: 2-fluororibose; note = backbone modification: 5'-phosphorothioate; note = thymine
  modified_base 5: mod_base = OTHER; mod_base = m5c; note = sugar modification: 2-fluororibose; note = backbone modification: 5'-phosphorothioate
  modified_base 6: mod_base = OTHER; note = backbone modification: 5'-phosphorothioate; note = sugar modification: 2-fluororibose; note = thymine
  modified_base 7: mod_base = OTHER; note = backbone modification: 5'-phosphorothioate; note = sugar modification: 2-fluororibose; note = thymine
  modified_base 8: mod_base = OTHER; note = backbone modification: 5'-phosphorothioate; note = sugar modification: 2-fluororibose
  modified_base 9: mod_base = OTHER; note = backbone modification: 5'-phosphorothioate; note = sugar modification: 2-fluororibose; note = thymine
  modified_base 10: mod_base = OTHER; note = backbone modification: 5'-phosphorothioate; note = sugar modification: 2-fluororibose
  modified_base 11: mod_base = m5c; mod_base = OTHER; note = sugar modification: 2-fluororibose; note = backbone modification: 5'-phosphorothioate
  modified_base 12: mod_base = OTHER; note = thymine; note = backbone modification: 5'-phosphorothioate; note = sugar modification: 2-fluororibose
  modified_base 13: mod_base = OTHER; note = sugar modification: 2-fluororibose; note = thymine; note = backbone modification: 5'-phosphorothioate
  modified_base 14: mod_base = m5c; mod_base = OTHER; note = backbone modification: 5'-phosphorothioate; note = sugar modification: 2-fluororibose
  modified_base 15: mod_base = OTHER; note = backbone modification: 5'-phosphorothioate; note = sugar modification: 2-fluororibose
  modified_base 16: mod_base = OTHER; note = backbone modification: 5'-phosphorothioate; note = sugar modification: 2'-O-methoxyethylribose; note = thymine
  modified_base 17: mod_base = OTHER; mod_base = m5c; note = sugar modification: 2'-O-methoxyethylribose; note = backbone modification: 5'-phosphorothioate
  modified_base 18: mod_base = m5c; mod_base = OTHER; note = sugar modification: lna
tgttcttgtacttcatcc

SEQ ID NO: 861 - RNA, 15 nt, synthetic construct
  source 1..15: mol_type = other RNA; note = Antisense oligonucleotide
  modified_base 1: mod_base = OTHER; mod_base = m5c; note = sugar modification: lna; note = backbone modification: 5'-phosphorothioate
  modified_base 2: mod_base = OTHER; note = sugar modification: 2'-O-methoxyethylribose; note = thymine; note = backbone modification: 5'-phosphorothioate
  modified_base 3: mod_base = OTHER; note = thymine; note = sugar modification: 2'-O-methoxyethylribose; note = backbone modification: 5'-phosphorothioate
  modified_base 4: mod_base = OTHER; note = sugar modification: 2'-O-methoxyethylribose; note = backbone modification: 5'-phosphorothioate
  modified_base 5: mod_base = OTHER; note = backbone modification: 5'-phosphorothioate; note = thymine; note = sugar modification: 2'-O-methoxyethylribose
  modified_base 6: mod_base = OTHER; note = backbone modification: 5'-phosphorothioate; note = sugar modification: 2'-O-methoxyethylribose
  modified_base 7: mod_base = OTHER; mod_base = m5c; note = sugar modification: 2'-O-methoxyethylribose; note = backbone modification: 5'-phosphorothioate
  modified_base 8: mod_base = OTHER; note = backbone modification: 5'-phosphorothioate; note = sugar modification: 2'-O-methoxyethylribose; note = thymine
  modified_base 9: mod_base = OTHER; note = backbone modification: 5'-phosphorothioate; note = sugar modification: 2'-O-methoxyethylribose; note = thymine
  modified_base 10: mod_base = OTHER; mod_base = m5c; note = backbone modification: 5'-phosphorothioate; note = sugar modification: 2'-O-methoxyethylribose
  modified_base 11: mod_base = OTHER; note = backbone modification: 5'-phosphorothioate; note = sugar modification: 2'-O-methoxyethylribose
  modified_base 12: mod_base = OTHER; note = backbone modification: 5'-phosphorothioate; note = thymine; note = sugar modification: 2'-O-methoxyethylribose
  modified_base 13: mod_base = m5c; mod_base = OTHER; note = backbone modification: 5'-phosphorothioate; note = sugar modification: 2'-O-methoxyethylribose
  modified_base 14: mod_base = OTHER; mod_base = m5c; note = backbone modification: 5'-phosphorothioate; note = sugar modification: 2'-O-methoxyethylribose
  modified_base 15: mod_base = OTHER; mod_base = m5c; note = sugar modification: 2'-O-methoxyethylribose
cttgtacttcatccc

SEQ ID NO: 862 - RNA, 15 nt, synthetic construct
  source 1..15: mol_type = other RNA; note = Antisense oligonucleotide
  modified_base 1: mod_base = OTHER; mod_base = m5c; note = backbone modification: 5'-phosphorothioate; note = sugar modification: lna
  modified_base 2: mod_base = OTHER; note = thymine; note = sugar modification: lna; note = backbone modification: 5'-phosphorothioate
  modified_base 3: mod_base = OTHER; note = sugar modification: 2'-O-methoxyethylribose; note = thymine; note = backbone modification: 5'-phosphorothioate
  modified_base 4: mod_base = OTHER; note = backbone modification: 5'-phosphorothioate; note = sugar modification: 2'-O-methoxyethylribose
  modified_base 5: mod_base = OTHER; note = thymine; note = backbone modification: 5'-phosphorothioate; note = sugar modification: 2'-O-methoxyethylribose
  modified_base 6: mod_base = OTHER; note = sugar modification: 2'-O-methoxyethylribose; note = backbone modification: 5'-phosphorothioate
  modified_base 7: mod_base = m5c; mod_base = OTHER; note = backbone modification: 5'-phosphorothioate; note = sugar modification: 2'-O-methoxyethylribose
  modified_base 8: mod_base = OTHER; note = backbone modification: 5'-phosphorothioate; note = sugar modification: 2'-O-methoxyethylribose; note = thymine
  modified_base 9: mod_base = OTHER; note = thymine; note = sugar modification: 2'-O-methoxyethylribose; note = backbone modification: 5'-phosphorothioate
  modified_base 10: mod_base = m5c; mod_base = OTHER; note = sugar modification: 2'-O-methoxyethylribose; note = backbone modification: 5'-phosphorothioate
  modified_base 11: mod_base = OTHER; note = sugar modification: 2'-O-methoxyethylribose; note = backbone modification: 5'-phosphorothioate
  modified_base 12: mod_base = OTHER; note = thymine; note = backbone modification: 5'-phosphorothioate; note = sugar modification: 2'-O-methoxyethylribose
  modified_base 13: mod_base = m5c; mod_base = OTHER; note = sugar modification: 2'-O-methoxyethylribose; note = backbone modification: 5'-phosphorothioate
  modified_base 14: mod_base = m5c; mod_base = OTHER; note = sugar modification: 2'-O-methoxyethylribose; note = backbone modification: 5'-phosphorothioate
  modified_base 15: mod_base = OTHER; mod_base = m5c; note = sugar modification: 2'-O-methoxyethylribose
cttgtacttcatccc

SEQ ID NO: 863 - RNA, 15 nt, synthetic construct
  source 1..15: mol_type = other RNA; note = Antisense oligonucleotide
  modified_base 1: mod_base = m5c; mod_base = OTHER; note = backbone modification: 5'-phosphorothioate; note = sugar modification: lna
  modified_base 2: mod_base = OTHER; note = sugar modification: lna; note = backbone modification: 5'-phosphorothioate; note = thymine
  modified_base 3: mod_base = OTHER; note = backbone modification: 5'-phosphorothioate; note = thymine; note = sugar modification: lna
  modified_base 4: mod_base = OTHER; note = sugar modification: 2'-O-methoxyethylribose; note = backbone modification: 5'-phosphorothioate
  modified_base 5: mod_base = OTHER; note = sugar modification: 2'-O-methoxyethylribose; note = backbone modification: 5'-phosphorothioate; note = thymine
  modified_base 6: mod_base = OTHER; note = sugar modification: 2'-O-methoxyethylribose; note = backbone modification: 5'-phosphorothioate
  modified_base 7: mod_base = OTHER; mod_base = m5c; note = backbone modification: 5'-phosphorothioate; note = sugar modification: 2'-O-methoxyethylribose
  modified_base 8: mod_base = OTHER; note = thymine; note = sugar modification: 2'-O-methoxyethylribose; note = backbone modification: 5'-phosphorothioate
  modified_base 9: mod_base = OTHER; note = backbone modification: 5'-phosphorothioate; note = thymine; note = sugar modification: 2'-O-methoxyethylribose
  modified_base 10: mod_base = m5c; mod_base = OTHER; note = backbone modification: 5'-phosphorothioate; note = sugar modification: 2'-O-methoxyethylribose
  modified_base 11: mod_base = OTHER; note = sugar modification: 2'-O-methoxyethylribose; note = backbone modification: 5'-phosphorothioate
  modified_base 12: mod_base = OTHER; note = sugar modification: 2'-O-methoxyethylribose; note = backbone modification: 5'-phosphorothioate; note = thymine
  modified_base 13: mod_base = m5c; mod_base = OTHER; note = backbone modification: 5'-phosphorothioate; note = sugar modification: 2'-O-methoxyethylribose
  modified_base 14: mod_base = OTHER; mod_base = m5c; note = backbone modification: 5'-phosphorothioate; note = sugar modification: 2'-O-methoxyethylribose
  modified_base 15: mod_base = OTHER; mod_base = m5c; note = sugar modification: 2'-O-methoxyethylribose
cttgtacttcatccc

SEQ ID NO: 864 - RNA, 15 nt, synthetic construct
  source 1..15: mol_type = other RNA; note = Antisense oligonucleotide
  modified_base 1: mod_base = m5c; mod_base = OTHER; note = backbone modification: 5'-phosphorothioate; note = sugar modification: lna
  modified_base 2: mod_base = OTHER; note = sugar modification: lna; note = backbone modification: 5'-phosphorothioate; note = thymine
  modified_base 3: mod_base = OTHER; note = thymine; note = backbone modification: 5'-phosphorothioate; note = sugar modification: lna
  modified_base 4: mod_base = OTHER; note = backbone modification: 5'-phosphorothioate; note = sugar modification: 2'-O-methoxyethylribose
  modified_base 5: mod_base = OTHER; note = sugar modification: 2'-O-methoxyethylribose; note = backbone modification: 5'-phosphorothioate; note = thymine
  modified_base 6: mod_base = OTHER; note = backbone modification: 5'-phosphorothioate; note = sugar modification: 2'-O-methoxyethylribose
  modified_base 7: mod_base = m5c; mod_base = OTHER; note = backbone modification: 5'-phosphorothioate; note = sugar modification: 2'-O-methoxyethylribose
  modified_base 8: mod_base = OTHER; note = sugar modification: 2'-O-methoxyethylribose; note = backbone modification: 5'-phosphorothioate; note = thymine
  modified_base 9: mod_base = OTHER; note = thymine; note = sugar modification: 2'-O-methoxyethylribose; note = backbone modification: 5'-phosphorothioate
  modified_base 10: mod_base = OTHER; mod_base = m5c; note = sugar modification: 2'-O-methoxyethylribose; note = backbone modification: 5'-phosphorothioate
  modified_base 11: mod_base = OTHER; note = sugar modification: 2'-O-methoxyethylribose; note = backbone modification: 5'-phosphorothioate
  modified_base 12: mod_base = OTHER; note = backbone modification: 5'-phosphorothioate; note = sugar modification: 2'-O-methoxyethylribose; note = thymine
  modified_base 13: mod_base = OTHER; mod_base = m5c; note = backbone modification: 5'-phosphorothioate; note = sugar modification: 2'-O-methoxyethylribose
  modified_base 14: mod_base = m5c; mod_base = OTHER; note = sugar modification: 2'-O-methoxyethylribose; note = backbone modification: 5'-phosphorothioate
  modified_base 15: mod_base = OTHER; mod_base = m5c; note = sugar modification: lna
cttgtacttcatccc

SEQ ID NO: 865 - RNA, 15 nt, synthetic construct
  source 1..15: mol_type = other RNA; note = Antisense oligonucleotide
  modified_base 1: mod_base = m5c; mod_base = OTHER; note = sugar modification: lna; note = backbone modification: 5'-phosphorothioate
  modified_base 2: mod_base = OTHER; note = thymine; note = backbone modification: 5'-phosphorothioate; note = sugar modification: lna
  modified_base 3: mod_base = OTHER; note = backbone modification: 5'-phosphorothioate; note = sugar modification: lna; note = thymine
  modified_base 4: mod_base = OTHER; note = sugar modification: 2'-O-methoxyethylribose; note = backbone modification: 5'-phosphorothioate
  modified_base 5: mod_base = OTHER; note = backbone modification: 5'-phosphorothioate; note = sugar modification: 2'-O-methoxyethylribose; note = thymine
  modified_base 6: mod_base = OTHER; note = sugar modification: 2'-O-methoxyethylribose; note = backbone modification: 5'-phosphorothioate
  modified_base 7: mod_base = OTHER; mod_base = m5c; note = backbone modification: 5'-phosphorothioate; note = sugar modification: 2'-O-methoxyethylribose
  modified_base 8: mod_base = OTHER; note = thymine; note = backbone modification: 5'-phosphorothioate; note = sugar modification: 2'-O-methoxyethylribose
  modified_base 9: mod_base = OTHER; note = thymine; note = sugar modification: 2'-O-methoxyethylribose; note = backbone modification: 5'-phosphorothioate
  modified_base 10: mod_base = OTHER; mod_base = m5c; note = sugar modification: 2'-O-methoxyethylribose; note = backbone modification: 5'-phosphorothioate
  modified_base 11: mod_base = OTHER; note = backbone modification: 5'-phosphorothioate; note = sugar modification: 2'-O-methoxyethylribose
  modified_base 12: mod_base = OTHER; note = thymine; note = sugar modification: 2'-O-methoxyethylribose; note = backbone modification: 5'-phosphorothioate
  modified_base 13: mod_base = OTHER; mod_base = m5c; note = backbone modification: 5'-phosphorothioate; note = sugar modification: 2'-O-methoxyethylribose
  modified_base 14: mod_base = m5c; mod_base = OTHER; note = backbone modification: 5'-phosphorothioate; note = sugar modification: lna
  modified_base 15: mod_base = OTHER; mod_base = m5c; note = sugar modification: lna
cttgtacttcatccc

SEQ ID NO: 866 - RNA, 15 nt, synthetic construct
  source 1..15: mol_type = other RNA; note = Antisense oligonucleotide
  modified_base 1: mod_base = m5c; mod_base = OTHER; note = backbone modification: 5'-phosphorothioate; note = sugar modification: lna
  modified_base 2: mod_base = OTHER; note = backbone modification: 5'-phosphorothioate; note = thymine; note = sugar modification: 2'-O-methoxyethylribose
  modified_base 3: mod_base = OTHER; note = backbone modification: 5'-phosphorothioate; note = sugar modification: 2'-O-methoxyethylribose; note = thymine
  modified_base 4: mod_base = OTHER; note = backbone modification: 5'-phosphorothioate; note = sugar modification: 2'-O-methoxyethylribose
  modified_base 5: mod_base = OTHER; note = thymine; note = sugar modification: 2'-O-methoxyethylribose; note = backbone modification: 5'-phosphorothioate
  modified_base 6: mod_base = OTHER; note = sugar modification: 2'-O-methoxyethylribose; note = backbone modification: 5'-phosphorothioate
  modified_base 7: mod_base = OTHER; mod_base = m5c; note = backbone modification: 5'-phosphorothioate; note = sugar modification: 2'-O-methoxyethylribose
  modified_base 8: mod_base = OTHER; note = sugar modification: 2'-O-methoxyethylribose; note = backbone modification: 5'-phosphorothioate; note = thymine
  modified_base 9: mod_base = OTHER; note = backbone modification: 5'-phosphorothioate; note = thymine; note = sugar modification: 2'-O-methoxyethylribose
  modified_base 10: mod_base = m5c; mod_base = OTHER; note = sugar modification: 2'-O-methoxyethylribose; note = backbone modification: 5'-phosphorothioate
  modified_base 11: mod_base = OTHER; note = sugar modification: 2'-O-methoxyethylribose; note = backbone modification: 5'-phosphorothioate
  modified_base 12: mod_base = OTHER; note = backbone modification: 5'-phosphorothioate; note = thymine; note = sugar modification: 2'-O-methoxyethylribose
  modified_base 13: mod_base = OTHER; mod_base = m5c; note = sugar modification: lna; note = backbone modification: 5'-phosphorothioate
  modified_base 14: mod_base = m5c; mod_base = OTHER; note = sugar modification: lna; note = backbone modification: 5'-phosphorothioate
  modified_base 15: mod_base = OTHER; mod_base = m5c; note = sugar modification: lna
cttgtacttcatccc

SEQ ID NO: 867 - RNA, 15 nt, synthetic construct
  source 1..15: mol_type = other RNA; note = Antisense oligonucleotide
  modified_base 1: mod_base = m5c; mod_base = OTHER; note = sugar modification: lna; note = backbone modification: 5'-phosphorothioate
  modified_base 2: mod_base = OTHER; note = thymine; note = sugar modification: lna; note = backbone modification: 5'-phosphorothioate
  modified_base 3: mod_base = OTHER; note = backbone modification: 5'-phosphorothioate; note = sugar modification: 2'-O-methoxyethylribose; note = thymine
  modified_base 4: mod_base = OTHER; note = backbone modification: 5'-phosphorothioate; note = sugar modification: 2'-O-methoxyethylribose
  modified_base 5: mod_base = OTHER; note = sugar modification: 2'-O-methoxyethylribose; note = thymine; note = backbone modification: 5'-phosphorothioate
  modified_base 6: mod_base = OTHER; note = backbone modification: 5'-phosphorothioate; note = sugar modification: 2'-O-methoxyethylribose
  modified_base 7: mod_base = OTHER; mod_base = m5c; note = backbone modification: 5'-phosphorothioate; note = sugar modification: 2'-O-methoxyethylribose
  modified_base 8: mod_base = OTHER; note = thymine; note = backbone modification: 5'-phosphorothioate; note = sugar modification: 2'-O-methoxyethylribose
  modified_base 9: mod_base = OTHER; note = thymine; note = sugar modification: 2'-O-methoxyethylribose; note = backbone modification: 5'-phosphorothioate
  modified_base 10: mod_base = m5c; mod_base = OTHER; note = sugar modification: 2'-O-methoxyethylribose; note = backbone modification: 5'-phosphorothioate
  modified_base 11: mod_base = OTHER; note = backbone modification: 5'-phosphorothioate; note = sugar modification: 2'-O-methoxyethylribose
  modified_base 12: mod_base = OTHER; note = backbone modification: 5'-phosphorothioate; note = sugar modification: 2'-O-methoxyethylribose; note = thymine
  modified_base 13: mod_base = m5c; mod_base = OTHER; note = backbone modification: 5'-phosphorothioate; note = sugar modification: lna
  modified_base 14: mod_base = OTHER; mod_base = m5c; note = sugar modification: lna; note = backbone modification: 5'-phosphorothioate
  modified_base 15: mod_base = m5c; mod_base = OTHER; note = sugar modification: lna
cttgtacttcatccc

SEQ ID NO: 868 - RNA, 15 nt, synthetic construct
  source 1..15: mol_type = other RNA; note = Antisense oligonucleotide
  modified_base 1: mod_base = OTHER; mod_base = m5c; note = sugar modification: 2'-O-methoxyethylribose; note = backbone modification: 5'-phosphorothioate
  modified_base 2: mod_base = OTHER; note = thymine; note = sugar modification: 2'-O-methoxyethylribose; note = backbone modification: 5'-phosphorothioate
  modified_base 3: mod_base = OTHER; note = backbone modification: 5'-phosphorothioate; note = thymine; note = sugar modification: 2'-O-methoxyethylribose
  modified_base 4: mod_base = OTHER; note = sugar modification: 2'-O-methoxyethylribose; note = backbone modification: 5'-phosphorothioate
  modified_base 5: mod_base = OTHER; note = backbone modification: 5'-phosphorothioate; note = thymine; note = sugar modification: 2'-O-methoxyethylribose
  modified_base 6: mod_base = OTHER; note = sugar modification: 2'-O-methoxyethylribose; note = backbone modification: 5'-phosphorothioate
  modified_base 7: mod_base = OTHER; mod_base = m5c; note = sugar modification: 2'-O-methoxyethylribose; note = backbone modification: 5'-phosphorothioate
  modified_base 8: mod_base = OTHER; note = thymine; note = sugar modification: 2'-O-methoxyethylribose; note = backbone modification: 5'-phosphorothioate
  modified_base 9: mod_base = OTHER; note = backbone modification: 5'-phosphorothioate; note = sugar modification: 2'-O-methoxyethylribose; note = thymine
  modified_base 10: mod_base = OTHER; mod_base = m5c; note = backbone modification: 5'-phosphorothioate; note = sugar modification: 2'-O-methoxyethylribose
  modified_base 11: mod_base = OTHER; note = sugar modification: 2'-O-methoxyethylribose; note = backbone modification: 5'-phosphorothioate
  modified_base 12: mod_base = OTHER; note = backbone modification: 5'-phosphorothioate; note = sugar modification: 2'-O-methoxyethylribose; note = thymine
  modified_base 13: mod_base = OTHER; mod_base = m5c; note = sugar modification: 2'-O-methoxyethylribose; note = backbone modification: 5'-phosphorothioate
  modified_base 14: mod_base = m5c; mod_base = OTHER; note = backbone modification: 5'-phosphorothioate; note = sugar modification: 2'-O-methoxyethylribose
  modified_base 15: mod_base = OTHER; mod_base = m5c; note = sugar modification: lna
cttgtacttcatccc

SEQ ID NO: 869 - RNA, 15 nt, synthetic construct
  source 1..15: mol_type = other RNA; note = Antisense oligonucleotide
  modified_base 1: mod_base = m5c; mod_base = OTHER; note = sugar modification: 2'-O-methoxyethylribose; note = backbone modification: 5'-phosphorothioate
  modified_base 2: mod_base = OTHER; note = backbone modification: 5'-phosphorothioate; note = thymine; note = sugar modification: 2'-O-methoxyethylribose
  modified_base 3: mod_base = OTHER; note = backbone modification: 5'-phosphorothioate; note = sugar modification: 2'-O-methoxyethylribose; note = thymine
  modified_base 4: mod_base = OTHER; note = backbone modification: 5'-phosphorothioate; note = sugar modification: 2'-O-methoxyethylribose
  modified_base 5: mod_base = OTHER; note = sugar modification: 2'-O-methoxyethylribose; note = backbone modification: 5'-phosphorothioate; note = thymine
  modified_base 6: mod_base = OTHER; note = sugar modification: 2'-O-methoxyethylribose; note = backbone modification: 5'-phosphorothioate
  modified_base 7: mod_base = m5c; mod_base = OTHER; note = backbone modification: 5'-phosphorothioate; note = sugar modification: 2'-O-methoxyethylribose
  modified_base 8: mod_base = OTHER; note = sugar modification: 2'-O-methoxyethylribose; note = thymine; note = backbone modification: 5'-phosphorothioate
  modified_base 9: mod_base = OTHER; note = backbone modification: 5'-phosphorothioate; note = sugar modification: 2'-O-methoxyethylribose; note = thymine
  modified_base 10: mod_base = m5c; mod_base = OTHER; note = backbone modification: 5'-phosphorothioate; note = sugar modification: 2'-O-methoxyethylribose
  modified_base 11: mod_base = OTHER; note = sugar modification: 2'-O-methoxyethylribose; note = backbone modification: 5'-phosphorothioate
  modified_base 12: mod_base = OTHER; note = thymine; note = sugar modification: 2'-O-methoxyethylribose; note = backbone modification: 5'-phosphorothioate
  modified_base 13: mod_base = OTHER; mod_base = m5c; note = sugar modification: 2'-O-methoxyethylribose; note = backbone modification: 5'-phosphorothioate
  modified_base 14: mod_base = m5c; mod_base = OTHER; note = sugar modification: lna; note = backbone modification: 5'-phosphorothioate
  modified_base 15: mod_base = m5c; mod_base = OTHER; note = sugar modification: lna
cttgtacttcatccc

SEQ ID NO: 870 - RNA, 15 nt, synthetic construct
  source 1..15: mol_type = other RNA; note = Antisense oligonucleotide
  modified_base 1: mod_base = OTHER; mod_base = m5c; note = sugar modification: 2'-O-methoxyethylribose; note = backbone modification: 5'-phosphorothioate
  modified_base 2: mod_base = OTHER; note = backbone modification: 5'-phosphorothioate; note = thymine; note = sugar modification: 2'-O-methoxyethylribose
  modified_base 3: mod_base = OTHER; note = backbone modification: 5'-phosphorothioate; note = thymine; note = sugar modification: 2'-O-methoxyethylribose
  modified_base 4: mod_base = OTHER; note = backbone modification: 5'-phosphorothioate; note = sugar modification: 2'-O-methoxyethylribose
  modified_base 5: mod_base = OTHER; note = thymine; note = sugar modification: 2'-O-methoxyethylribose; note = backbone modification: 5'-phosphorothioate
  modified_base 6: mod_base = OTHER; note = sugar modification: 2'-O-methoxyethylribose; note = backbone modification: 5'-phosphorothioate
  modified_base 7: mod_base = m5c; mod_base = OTHER; note = sugar modification: 2'-O-methoxyethylribose; note = backbone modification: 5'-phosphorothioate
  modified_base 8: mod_base = OTHER; note = sugar modification: 2'-O-methoxyethylribose; note = thymine; note = backbone modification: 5'-phosphorothioate
  modified_base 9: mod_base = OTHER; note = sugar modification: 2'-O-methoxyethylribose; note = backbone modification: 5'-phosphorothioate; note = thymine
  modified_base 10: mod_base = m5c; mod_base = OTHER; note = sugar modification: 2'-O-methoxyethylribose; note = backbone modification: 5'-phosphorothioate
  modified_base 11: mod_base = OTHER; note = sugar modification: 2'-O-methoxyethylribose; note = backbone modification: 5'-phosphorothioate
  modified_base 12: mod_base = OTHER; note = thymine; note = backbone modification: 5'-phosphorothioate; note = sugar modification: 2'-O-methoxyethylribose
  modified_base 13: mod_base = m5c; mod_base = OTHER; note = sugar modification: lna; note = backbone modification: 5'-phosphorothioate
  modified_base 14: mod_base = m5c; mod_base = OTHER; note = backbone modification: 5'-phosphorothioate; note = sugar modification: lna
  modified_base 15: mod_base = OTHER; mod_base = m5c; note = sugar modification: lna
cttgtacttcatccc

SEQ ID NO: 871 - RNA, 15 nt, synthetic construct
  source 1..15: mol_type = other RNA; note = Antisense oligonucleotide
  modified_base 1: mod_base = OTHER; note = sugar modification: lna; note = backbone modification: 5'-phosphorothioate; note = thymine
  modified_base 2: mod_base = OTHER; mod_base = m5c; note = backbone modification: 5'-phosphorothioate; note = sugar modification: 2'-O-methoxyethylribose
  modified_base 3: mod_base = OTHER; note = thymine; note = sugar modification: 2'-O-methoxyethylribose; note = backbone modification: 5'-phosphorothioate
  modified_base 4: mod_base = OTHER; note = sugar modification: 2'-O-methoxyethylribose; note = thymine; note = backbone modification: 5'-phosphorothioate
  modified_base 5: mod_base = OTHER; note = backbone modification: 5'-phosphorothioate; note = sugar modification: 2'-O-methoxyethylribose
  modified_base 6: mod_base = OTHER; note = backbone modification: 5'-phosphorothioate; note = sugar modification: 2'-O-methoxyethylribose; note = thymine
  modified_base 7: mod_base = OTHER; note = backbone modification: 5'-phosphorothioate; note = sugar modification: 2'-O-methoxyethylribose
  modified_base 8: mod_base = OTHER; mod_base = m5c; note = sugar modification: 2'-O-methoxyethylribose; note = backbone modification: 5'-phosphorothioate
  modified_base 9: mod_base = OTHER; note = thymine; note = backbone modification: 5'-phosphorothioate; note = sugar modification: 2'-O-methoxyethylribose
  modified_base 10: mod_base = OTHER; note = sugar modification: 2'-O-methoxyethylribose; note = backbone modification: 5'-phosphorothioate; note = thymine
  modified_base 11: mod_base = OTHER; mod_base = m5c; note = backbone modification: 5'-phosphorothioate; note = sugar modification: 2'-O-methoxyethylribose
  modified_base 12: mod_base = OTHER; note = backbone modification: 5'-phosphorothioate; note = sugar modification: 2'-O-methoxyethylribose
  modified_base 13: mod_base = OTHER; note = backbone modification: 5'-phosphorothioate; note = sugar modification: 2'-O-methoxyethylribose; note = thymine
  modified_base 14: mod_base = m5c; mod_base = OTHER; note = sugar modification: 2'-O-methoxyethylribose; note = backbone modification: 5'-phosphorothioate
  modified_base 15: mod_base = m5c; mod_base = OTHER; note = sugar modification: 2'-O-methoxyethylribose
tcttgtacttcatcc

SEQ ID NO: 872 - RNA, 15 nt, synthetic construct
  source 1..15: mol_type = other RNA; note = Antisense oligonucleotide
  modified_base 1: mod_base = OTHER; note = thymine; note = sugar modification: lna; note = backbone modification: 5'-phosphorothioate
  modified_base 2: mod_base = m5c; mod_base = OTHER; note = sugar modification: lna; note = backbone modification: 5'-phosphorothioate
  modified_base 3: mod_base = OTHER; note = thymine; note = sugar modification: 2'-O-methoxyethylribose; note = backbone modification: 5'-phosphorothioate
  modified_base 4: mod_base = OTHER; note = sugar modification: 2'-O-methoxyethylribose; note = backbone modification: 5'-phosphorothioate; note = thymine
  modified_base 5: mod_base = OTHER; note = sugar modification: 2'-O-methoxyethylribose; note = backbone modification: 5'-phosphorothioate
  modified_base 6: mod_base = OTHER; note = backbone modification: 5'-phosphorothioate; note = thymine; note = sugar modification: 2'-O-methoxyethylribose
  modified_base 7: mod_base = OTHER; note = sugar modification: 2'-O-methoxyethylribose; note = backbone modification: 5'-phosphorothioate
  modified_base 8: mod_base = m5c; mod_base = OTHER; note = backbone modification: 5'-phosphorothioate; note = sugar modification: 2'-O-methoxyethylribose
  modified_base 9: mod_base = OTHER; note = thymine; note = sugar modification: 2'-O-methoxyethylribose; note = backbone modification: 5'-phosphorothioate
  modified_base 10: mod_base = OTHER; note = backbone modification: 5'-phosphorothioate; note = sugar modification: 2'-O-methoxyethylribose; note = thymine
  modified_base 11: mod_base = OTHER; mod_base = m5c; note = sugar modification: 2'-O-methoxyethylribose; note = backbone modification: 5'-phosphorothioate
  modified_base 12: mod_base = OTHER; note = sugar modification: 2'-O-methoxyethylribose; note = backbone modification: 5'-phosphorothioate
  modified_base 13: mod_base = OTHER; note = sugar modification: 2'-O-methoxyethylribose; note = backbone modification: 5'-phosphorothioate; note = thymine
  modified_base 14: mod_base = m5c; mod_base = OTHER; note = sugar modification: 2'-O-methoxyethylribose; note = backbone modification: 5'-phosphorothioate
  modified_base 15: mod_base = OTHER; mod_base = m5c; note = sugar modification: 2'-O-methoxyethylribose
tcttgtacttcatcc

SEQ ID NO: 873 - RNA, 15 nt, synthetic construct
  source 1..15: mol_type = other RNA; note = Antisense oligonucleotide
  modified_base 1: mod_base = OTHER; note = backbone modification: 5'-phosphorothioate; note = thymine; note = sugar modification: lna
  modified_base 2: mod_base = m5c; mod_base = OTHER; note = backbone modification: 5'-phosphorothioate; note = sugar modification: lna
  modified_base 3: mod_base = OTHER; note = thymine; note = sugar modification: lna; note = backbone modification: 5'-phosphorothioate
  modified_base 4: mod_base = OTHER; note = backbone modification: 5'-phosphorothioate; note = sugar modification: 2'-O-methoxyethylribose; note = thymine
  modified_base 5: mod_base = OTHER; note = backbone modification: 5'-phosphorothioate; note = sugar modification: 2'-O-methoxyethylribose
  modified_base 6: mod_base = OTHER; note = thymine; note = backbone modification: 5'-phosphorothioate; note = sugar modification: 2'-O-methoxyethylribose
  modified_base 7: mod_base = OTHER; note = backbone modification: 5'-phosphorothioate; note = sugar modification: 2'-O-methoxyethylribose
  modified_base 8: mod_base = OTHER; mod_base = m5c; note = sugar modification: 2'-O-methoxyethylribose; note = backbone modification: 5'-phosphorothioate
  modified_base 9: mod_base = OTHER; note = backbone modification: 5'-phosphorothioate; note = thymine; note = sugar modification: 2'-O-methoxyethylribose
  modified_base 10: mod_base = OTHER; note = thymine; note = sugar modification: 2'-O-methoxyethylribose; note = backbone modification: 5'-phosphorothioate
  modified_base 11: mod_base = m5c; mod_base = OTHER; note = sugar modification: 2'-O-methoxyethylribose; note = backbone modification: 5'-phosphorothioate
  modified_base 12: mod_base = OTHER; note = backbone modification: 5'-phosphorothioate; note = sugar modification: 2'-O-methoxyethylribose
  modified_base 13: mod_base = OTHER; note = thymine; note = sugar modification: 2'-O-methoxyethylribose; note = backbone modification: 5'-phosphorothioate
  modified_base 14: mod_base = OTHER; mod_base = m5c; note = backbone modification: 5'-phosphorothioate; note = sugar modification: 2'-O-methoxyethylribose
  modified_base 15: mod_base = m5c; mod_base = OTHER; note = sugar modification: 2'-O-methoxyethylribose
tcttgtacttcatcc

SEQ ID NO: 874 - RNA, 15 nt, synthetic construct
  source 1..15: mol_type = other RNA; note = Antisense oligonucleotide
  modified_base 1: mod_base = OTHER; note = thymine; note = sugar modification: lna; note = backbone modification: 5'-phosphorothioate
  modified_base 2: mod_base = m5c; mod_base = OTHER; note = backbone modification: 5'-phosphorothioate; note = sugar modification: 2'-O-methoxyethylribose
  modified_base 3: mod_base = OTHER; note = sugar modification: 2'-O-methoxyethylribose; note = backbone modification: 5'-phosphorothioate; note = thymine
  modified_base 4: mod_base = OTHER; note = thymine; note = sugar modification: 2'-O-methoxyethylribose; note = backbone modification: 5'-phosphorothioate
  modified_base 5: mod_base = OTHER; note = backbone modification: 5'-phosphorothioate; note = sugar modification: 2'-O-methoxyethylribose
  modified_base 6: mod_base = OTHER; note = thymine; note = sugar modification: 2'-O-methoxyethylribose; note = backbone modification: 5'-phosphorothioate
  modified_base 7: mod_base = OTHER; note = backbone modification: 5'-phosphorothioate; note = sugar modification: 2'-O-methoxyethylribose
  modified_base 8: mod_base = m5c; mod_base = OTHER; note = sugar modification: 2'-O-methoxyethylribose; note = backbone modification: 5'-phosphorothioate
  modified_base 9: mod_base = OTHER; note = sugar modification: 2'-O-methoxyethylribose; note = backbone modification: 5'-phosphorothioate; note = thymine
  modified_base 10: mod_base = OTHER; note = thymine; note = backbone modification: 5'-phosphorothioate; note = sugar modification: 2'-O-methoxyethylribose
  modified_base 11: mod_base = m5c; mod_base = OTHER; note = sugar modification: 2'-O-methoxyethylribose; note = backbone modification: 5'-phosphorothioate
  modified_base 12: mod_base = OTHER; note = sugar modification: 2'-O-methoxyethylribose; note = backbone modification: 5'-phosphorothioate
  modified_base 13: mod_base = OTHER; note = thymine; note = sugar modification: 2'-O-methoxyethylribose; note = backbone modification: 5'-phosphorothioate
  modified_base 14: mod_base = OTHER; mod_base = m5c; note = sugar modification: 2'-O-methoxyethylribose; note = backbone modification: 5'-phosphorothioate
  modified_base 15: mod_base = OTHER; mod_base = m5c; note = sugar modification: lna
tcttgtacttcatcc

SEQ ID NO: 875 - RNA, 15 nt, synthetic construct
  source 1..15: mol_type = other RNA; note = Antisense oligonucleotide
  modified_base 1: mod_base = OTHER; note = sugar modification: lna; note = thymine; note = backbone modification: 5'-phosphorothioate
  modified_base 2: mod_base = m5c; mod_base = OTHER; note = sugar modification: lna; note = backbone modification: 5'-phosphorothioate
  modified_base 3: mod_base = OTHER; note = sugar modification: 2'-O-methoxyethylribose; note = backbone modification: 5'-phosphorothioate; note = thymine
  modified_base 4: mod_base = OTHER; note = thymine; note = backbone modification: 5'-phosphorothioate; note = sugar modification: 2'-O-methoxyethylribose
  modified_base 5: mod_base = OTHER; note = backbone modification: 5'-phosphorothioate; note = sugar modification: 2'-O-methoxyethylribose
  modified_base 6: mod_base = OTHER; note = backbone modification: 5'-phosphorothioate; note = thymine; note = sugar modification: 2'-O-methoxyethylribose
  modified_base 7: mod_base = OTHER; note = backbone modification: 5'-phosphorothioate; note = sugar modification: 2'-O-methoxyethylribose
  modified_base 8: mod_base = m5c; mod_base = OTHER; note = backbone modification: 5'-phosphorothioate; note = sugar modification: 2'-O-methoxyethylribose
  modified_base 9: mod_base = OTHER; note = sugar modification: 2'-O-methoxyethylribose; note = backbone modification: 5'-phosphorothioate; note = thymine
  modified_base 10: mod_base = OTHER; note = backbone modification: 5'-phosphorothioate; note = thymine; note = sugar modification: 2'-O-methoxyethylribose
  modified_base 11: mod_base = OTHER; mod_base = m5c; note = backbone modification: 5'-phosphorothioate; note = sugar modification: 2'-O-methoxyethylribose
  modified_base 12: mod_base = OTHER; note = backbone modification: 5'-phosphorothioate; note = sugar modification: 2'-O-methoxyethylribose
  modified_base 13: mod_base = OTHER; note = sugar modification: 2'-O-methoxyethylribose; note = thymine; note = backbone modification: 5'-phosphorothioate
  modified_base 14: mod_base = OTHER; mod_base = m5c; note = sugar modification: 2'-O-methoxyethylribose; note = backbone modification: 5'-phosphorothioate
  modified_base 15: mod_base = OTHER; mod_base = m5c; note = sugar modification: lna
tcttgtacttcatcc

SEQ ID NO: 876 - RNA, 15 nt, synthetic construct
  source 1..15: mol_type = other RNA; note = Antisense oligonucleotide
  modified_base 1: mod_base = OTHER; note = sugar modification: lna; note = backbone modification: 5'-phosphorothioate; note = thymine
  modified_base 2: mod_base = m5c; mod_base = OTHER; note = sugar modification: lna; note = backbone modification: 5'-phosphorothioate
  modified_base 3: mod_base = OTHER; note = sugar modification: lna; note = thymine; note = backbone modification: 5'-phosphorothioate
  modified_base 4: mod_base = OTHER; note = sugar modification: 2'-O-methoxyethylribose; note = backbone modification: 5'-phosphorothioate; note = thymine
  modified_base 5: mod_base = OTHER; note = sugar modification: 2'-O-methoxyethylribose; note = backbone modification: 5'-phosphorothioate
  modified_base 6: mod_base = OTHER; note = thymine; note = backbone modification: 5'-phosphorothioate; note = sugar modification: 2'-O-methoxyethylribose
  modified_base 7: mod_base = OTHER; note = backbone modification: 5'-phosphorothioate; note = sugar modification: 2'-O-methoxyethylribose
  modified_base 8: mod_base = OTHER; mod_base = m5c; note = backbone modification: 5'-phosphorothioate; note = sugar modification: 2'-O-methoxyethylribose
  modified_base 9: mod_base = OTHER; note = sugar modification: 2'-O-methoxyethylribose; note = backbone modification: 5'-phosphorothioate; note = thymine
  modified_base 10: mod_base = OTHER; note = thymine; note = sugar modification: 2'-O-methoxyethylribose; note = backbone modification: 5'-phosphorothioate
  modified_base 11: mod_base = m5c; mod_base = OTHER; note = sugar modification: 2'-O-methoxyethylribose; note = backbone modification: 5'-phosphorothioate
  modified_base 12: mod_base = OTHER; note = sugar modification: 2'-O-methoxyethylribose; note = backbone modification: 5'-phosphorothioate
  modified_base 13: mod_base = OTHER; note = thymine; note = sugar modification: 2'-O-methoxyethylribose; note = backbone modification: 5'-phosphorothioate
  modified_base 14: mod_base = OTHER; mod_base = m5c; note = backbone modification: 5'-phosphorothioate; note = sugar modification: 2'-O-methoxyethylribose
  modified_base 15: mod_base = m5c; mod_base = OTHER; note = sugar modification: lna
tcttgtacttcatcc

SEQ ID NO: 877 - RNA, 15 nt, synthetic construct
  source 1..15: mol_type = other RNA; note = Antisense oligonucleotide
  modified_base 1: mod_base = OTHER; note = sugar modification: lna; note = backbone modification: 5'-phosphorothioate; note = thymine
  modified_base 2: mod_base = OTHER; mod_base = m5c; note = backbone modification: 5'-phosphorothioate; note = sugar modification: 2'-O-methoxyethylribose
  modified_base 3: mod_base = OTHER; note = sugar modification: 2'-O-methoxyethylribose; note = thymine; note = backbone modification: 5'-phosphorothioate
  modified_base 4: mod_base = OTHER; note = backbone modification: 5'-phosphorothioate; note = thymine; note = sugar modification: 2'-O-methoxyethylribose
  modified_base 5: mod_base = OTHER; note = sugar modification: 2'-O-methoxyethylribose; note = backbone modification: 5'-phosphorothioate
  modified_base 6: mod_base = OTHER; note = sugar modification: 2'-O-methoxyethylribose; note = backbone modification: 5'-phosphorothioate; note = thymine
  modified_base 7: mod_base = OTHER; note = sugar modification: 2'-O-methoxyethylribose; note = backbone modification: 5'-phosphorothioate
  modified_base 8: mod_base = m5c; mod_base = OTHER; note = sugar modification: 2'-O-methoxyethylribose; note = backbone modification: 5'-phosphorothioate
  modified_base 9: mod_base = OTHER; note = backbone modification: 5'-phosphorothioate; note = sugar modification: 2'-O-methoxyethylribose; note = thymine
  modified_base 10: mod_base = OTHER; note = backbone modification: 5'-phosphorothioate; note = thymine; note = sugar modification: 2'-O-methoxyethylribose
  modified_base 11: mod_base = OTHER; mod_base = m5c; note = sugar modification: 2'-O-methoxyethylribose; note = backbone modification: 5'-phosphorothioate
  modified_base 12: mod_base = OTHER; note = backbone modification: 5'-phosphorothioate; note = sugar modification: 2'-O-methoxyethylribose
  modified_base 13: mod_base = OTHER; note = sugar modification: 2'-O-methoxyethylribose; note = thymine; note = backbone modification: 5'-phosphorothioate
  modified_base 14: mod_base = OTHER; mod_base = m5c; note = backbone modification: 5'-phosphorothioate; note = sugar modification: lna
  modified_base 15: mod_base = OTHER; mod_base = m5c; note = sugar modification: lna
tcttgtacttcatcc

SEQ ID NO: 878 - RNA, 15 nt, synthetic construct
  source 1..15: mol_type = other RNA; note = Antisense oligonucleotide
  modified_base 1: mod_base = OTHER; note = backbone modification: 5'-phosphorothioate; note = thymine; note = sugar modification: lna
  modified_base 2: mod_base = m5c; mod_base = OTHER; note = sugar modification: lna; note = backbone modification: 5'-phosphorothioate
  modified_base 3: mod_base = OTHER; note = thymine; note = sugar modification: 2'-O-methoxyethylribose; note = backbone modification: 5'-phosphorothioate
  modified_base 4: mod_base = OTHER; note = backbone modification: 5'-phosphorothioate; note = thymine; note = sugar modification: 2'-O-methoxyethylribose
  modified_base 5: mod_base = OTHER; note = backbone modification: 5'-phosphorothioate; note = sugar modification: 2'-O-methoxyethylribose
  modified_base 6: mod_base = OTHER; note = thymine; note = backbone modification: 5'-phosphorothioate; note = sugar modification: 2'-O-methoxyethylribose
  modified_base 7: mod_base = OTHER; note = sugar modification: 2'-O-methoxyethylribose; note = backbone modification: 5'-phosphorothioate
  modified_base 8: mod_base = OTHER; mod_base = m5c; note = sugar modification: 2'-O-methoxyethylribose; note = backbone modification: 5'-phosphorothioate
  modified_base 9: mod_base = OTHER; note = thymine; note = backbone modification: 5'-phosphorothioate; note = sugar modification: 2'-O-methoxyethylribose
  modified_base 10: mod_base = OTHER; note = backbone modification: 5'-phosphorothioate; note = thymine; note = sugar modification: 2'-O-methoxyethylribose
  modified_base 11: mod_base = m5c; mod_base = OTHER; note = sugar modification: 2'-O-methoxyethylribose; note = backbone modification: 5'-phosphorothioate
  modified_base 12: mod_base = OTHER; note = backbone modification: 5'-phosphorothioate; note = sugar modification: 2'-O-methoxyethylribose
  modified_base 13: mod_base = OTHER; note = sugar modification: 2'-O-methoxyethylribose; note = thymine; note = backbone modification: 5'-phosphorothioate
  modified_base 14: mod_base = m5c; mod_base = OTHER; note = sugar modification: lna; note = backbone modification: 5'-phosphorothioate
  modified_base 15: mod_base = m5c; mod_base = OTHER; note = sugar modification: lna
tcttgtacttcatcc

SEQ ID NO: 879 - RNA, 15 nt, synthetic construct
  source 1..15: mol_type = other RNA; note = Antisense oligonucleotide
  modified_base 1: mod_base = OTHER; note = sugar modification: lna; note = thymine; note = backbone modification: 5'-phosphorothioate
  modified_base 2: mod_base = m5c; mod_base = OTHER; note = backbone modification: 5'-phosphorothioate; note = sugar modification: lna
  modified_base 3: mod_base = OTHER; note = thymine; note = sugar modification: lna; note = backbone modification: 5'-phosphorothioate
  modified_base 4: mod_base = OTHER; note = sugar modification: 2'-O-methoxyethylribose; note = thymine; note = backbone modification: 5'-phosphorothioate
  modified_base 5: mod_base = OTHER; note = backbone modification: 5'-phosphorothioate; note = sugar modification: 2'-O-methoxyethylribose
  modified_base 6: mod_base = OTHER; note = thymine; note = backbone modification: 5'-phosphorothioate; note = sugar modification: 2'-O-methoxyethylribose
  modified_base 7: mod_base = OTHER; note = backbone modification: 5'-phosphorothioate; note = sugar modification: 2'-O-methoxyethylribose
  modified_base 8: mod_base = m5c; mod_base = OTHER; note = sugar modification: 2'-O-methoxyethylribose; note = backbone modification: 5'-phosphorothioate
  modified_base 9: mod_base = OTHER; note = thymine; note = sugar modification: 2'-O-methoxyethylribose; note = backbone modification: 5'-phosphorothioate
  modified_base 10: mod_base = OTHER; note = thymine; note = backbone modification: 5'-phosphorothioate; note = sugar modification: 2'-O-methoxyethylribose
  modified_base 11: mod_base = m5c; mod_base = OTHER; note = sugar modification: 2'-O-methoxyethylribose; note = backbone modification: 5'-phosphorothioate
  modified_base 12: mod_base = OTHER; note = sugar modification: 2'-O-methoxyethylribose; note = backbone modification: 5'-phosphorothioate
  modified_base 13: mod_base = OTHER; note = sugar modification: 2'-O-methoxyethylribose; note = backbone modification: 5'-phosphorothioate; note = thymine
  modified_base 14: mod_base = OTHER; mod_base = m5c; note = sugar modification: lna; note = backbone modification: 5'-phosphorothioate
  modified_base 15: mod_base = m5c; mod_base = OTHER; note = sugar modification: lna
tcttgtacttcatcc

SEQ ID NO: 880 - RNA, 15 nt, synthetic construct
  source 1..15: mol_type = other RNA; note = Antisense oligonucleotide
  modified_base 1: mod_base = OTHER; note = sugar modification: lna; note = thymine; note = backbone modification: 5'-phosphorothioate
  modified_base 2: mod_base = m5c; mod_base = OTHER; note = sugar modification: 2'-O-methoxyethylribose; note = backbone modification: 5'-phosphorothioate
  modified_base 3: mod_base = OTHER; note = thymine; note = sugar modification: 2'-O-methoxyethylribose; note = backbone modification: 5'-phosphorothioate
  modified_base 4: mod_base = OTHER; note = backbone modification: 5'-phosphorothioate; note = sugar modification: 2'-O-methoxyethylribose; note = thymine
  modified_base 5: mod_base = OTHER; note = backbone modification: 5'-phosphorothioate; note = sugar modification: 2'-O-methoxyethylribose
  modified_base 6: mod_base = OTHER; note = backbone modification: 5'-phosphorothioate; note = sugar modification: 2'-O-methoxyethylribose; note = thymine
  modified_base 7: mod_base = OTHER; note = sugar modification: 2'-O-methoxyethylribose; note = backbone modification: 5'-phosphorothioate
  modified_base 8: mod_base = OTHER; mod_base = m5c; note = sugar modification: 2'-O-methoxyethylribose; note = backbone modification: 5'-phosphorothioate
  modified_base 9: mod_base = OTHER; note = thymine; note = backbone modification: 5'-phosphorothioate; note = sugar modification: 2'-O-methoxyethylribose
  modified_base 10: mod_base = OTHER; note = thymine; note = sugar modification: 2'-O-methoxyethylribose; note = backbone modification: 5'-phosphorothioate
  modified_base 11: mod_base = m5c; mod_base = OTHER; note = backbone modification: 5'-phosphorothioate; note = sugar modification: 2'-O-methoxyethylribose
  modified_base 12: mod_base = OTHER; note = backbone modification: 5'-phosphorothioate; note = sugar modification: 2'-O-methoxyethylribose
  modified_base 13: mod_base = OTHER; note = thymine; note = backbone modification: 5'-phosphorothioate; note = sugar modification: lna
  modified_base 14: mod_base = m5c; mod_base = OTHER; note = backbone modification: 5'-phosphorothioate; note = sugar modification: lna
  modified_base 15: mod_base = m5c; mod_base = OTHER; note = sugar modification: lna
tcttgtacttcatcc

SEQ ID NO: 881 - RNA, 15 nt, synthetic construct
  source 1..15: mol_type = other RNA; note = Antisense oligonucleotide
  modified_base 1: mod_base = OTHER; note = sugar modification: lna; note = thymine; note = backbone modification: 5'-phosphorothioate
  modified_base 2: mod_base = m5c; mod_base = OTHER; note = sugar modification: lna; note = backbone modification: 5'-phosphorothioate
  modified_base 3: mod_base = OTHER; note = thymine; note = backbone modification: 5'-phosphorothioate; note = sugar modification: 2'-O-methoxyethylribose
  modified_base 4: mod_base = OTHER; note = sugar modification: 2'-O-methoxyethylribose; note = thymine; note = backbone modification: 5'-phosphorothioate
  modified_base 5: mod_base = OTHER; note = sugar modification: 2'-O-methoxyethylribose; note = backbone modification: 5'-phosphorothioate
  modified_base 6: mod_base = OTHER; note = sugar modification: 2'-O-methoxyethylribose; note = thymine; note = backbone modification: 5'-phosphorothioate
  modified_base 7: mod_base = OTHER; note = sugar modification: 2'-O-methoxyethylribose; note = backbone modification: 5'-phosphorothioate
  modified_base 8: mod_base = OTHER; mod_base = m5c; note = backbone modification: 5'-phosphorothioate; note = sugar modification: 2'-O-methoxyethylribose
  modified_base 9: mod_base = OTHER; note = thymine; note = sugar modification: 2'-O-methoxyethylribose; note = backbone modification: 5'-phosphorothioate
  modified_base 10: mod_base = OTHER; note = sugar modification: 2'-O-methoxyethylribose; note = thymine; note = backbone modification: 5'-phosphorothioate
  modified_base 11: mod_base = OTHER; mod_base = m5c; note = sugar modification: 2'-O-methoxyethylribose; note = backbone modification: 5'-phosphorothioate
  modified_base 12: mod_base = OTHER; note = sugar modification: 2'-O-methoxyethylribose; note = backbone modification: 5'-phosphorothioate
  modified_base 13: mod_base = OTHER; note = backbone modification: 5'-phosphorothioate; note = sugar modification: lna; note = thymine
  modified_base 14: mod_base = m5c; mod_base = OTHER; note = sugar modification: lna; note = backbone modification: 5'-phosphorothioate
  modified_base 15: mod_base = m5c; mod_base = OTHER; note = sugar modification: lna
tcttgtacttcatcc

SEQ ID NO: 882 - RNA, 15 nt, synthetic construct
  source 1..15: mol_type = other RNA; note = Antisense oligonucleotide
  modified_base 1: mod_base = OTHER; note = thymine; note = backbone modification: 5'-phosphorothioate; note = sugar modification: 2'-O-methoxyethylribose
  modified_base 2: mod_base = m5c; mod_base = OTHER; note = backbone modification: 5'-phosphorothioate; note = sugar modification: 2'-O-methoxyethylribose
  modified_base 3: mod_base = OTHER; note = backbone modification: 5'-phosphorothioate; note = thymine; note = sugar modification: 2'-O-methoxyethylribose
  modified_base 4: mod_base = OTHER; note = backbone modification: 5'-phosphorothioate; note = sugar modification: 2'-O-methoxyethylribose; note = thymine
  modified_base 5: mod_base = OTHER; note = backbone modification: 5'-phosphorothioate; note = sugar modification: 2'-O-methoxyethylribose
  modified_base 6: mod_base = OTHER; note = sugar modification: 2'-O-methoxyethylribose; note = thymine; note = backbone modification: 5'-phosphorothioate
  modified_base 7: mod_base = OTHER; note = backbone modification: 5'-phosphorothioate; note = sugar modification: 2'-O-methoxyethylribose
  modified_base 8: mod_base = m5c; mod_base = OTHER; note = sugar modification: 2'-O-methoxyethylribose; note = backbone modification: 5'-phosphorothioate
  modified_base 9: mod_base = OTHER; note = thymine; note = sugar modification: 2'-O-methoxyethylribose; note = backbone modification: 5'-phosphorothioate
  modified_base 10: mod_base = OTHER; note = thymine; note = backbone modification: 5'-phosphorothioate; note = sugar modification: 2'-O-methoxyethylribose
  modified_base 11: mod_base = m5c; mod_base = OTHER; note = sugar modification: 2'-O-methoxyethylribose; note = backbone modification: 5'-phosphorothioate
  modified_base 12: mod_base = OTHER; note = sugar modification: 2'-O-methoxyethylribose; note = backbone modification: 5'-phosphorothioate
  modified_base 13: mod_base = OTHER; note = thymine; note = backbone modification: 5'-phosphorothioate; note = sugar modification: 2'-O-methoxyethylribose
  modified_base 14: mod_base = OTHER; mod_base = m5c; note = backbone modification: 5'-phosphorothioate; note = sugar modification: 2'-O-methoxyethylribose
  modified_base 15: mod_base = OTHER; mod_base = m5c; note = sugar modification: lna
tcttgtacttcatcc

SEQ ID NO: 883 - RNA, 15 nt, synthetic construct
  source 1..15: mol_type = other RNA; note = Antisense oligonucleotide
  modified_base 1: mod_base = OTHER; note = backbone modification: 5'-phosphorothioate; note = sugar modification: 2'-O-methoxyethylribose; note = thymine
  modified_base 2: mod_base = OTHER; mod_base = m5c; note = backbone modification: 5'-phosphorothioate; note = sugar modification: 2'-O-methoxyethylribose
  modified_base 3: mod_base = OTHER; note = thymine; note = sugar modification: 2'-O-methoxyethylribose; note = backbone modification: 5'-phosphorothioate
  modified_base 4: mod_base = OTHER; note = sugar modification: 2'-O-methoxyethylribose; note = thymine; note = backbone modification: 5'-phosphorothioate
  modified_base 5: mod_base = OTHER; note = sugar modification: 2'-O-methoxyethylribose; note = backbone modification: 5'-phosphorothioate
  modified_base 6: mod_base = OTHER; note = backbone modification: 5'-phosphorothioate; note = thymine; note = sugar modification: 2'-O-methoxyethylribose
  modified_base 7: mod_base = OTHER; note = sugar modification: 2'-O-methoxyethylribose; note = backbone modification: 5'-phosphorothioate
  modified_base 8: mod_base = OTHER; mod_base = m5c; note = backbone modification: 5'-phosphorothioate; note = sugar modification: 2'-O-methoxyethylribose
  modified_base 9: mod_base = OTHER; note = backbone modification: 5'-phosphorothioate; note = thymine; note = sugar modification: 2'-O-methoxyethylribose
  modified_base 10: mod_base = OTHER; note = backbone modification: 5'-phosphorothioate; note = sugar modification: 2'-O-methoxyethylribose; note = thymine
  modified_base 11: mod_base = OTHER; mod_base = m5c; note = backbone modification: 5'-phosphorothioate; note = sugar modification: 2'-O-methoxyethylribose
  modified_base 12: mod_base = OTHER; note = sugar modification: 2'-O-methoxyethylribose; note = backbone modification: 5'-phosphorothioate
  modified_base 13: mod_base = OTHER; note = backbone modification: 5'-phosphorothioate; note = sugar modification: 2'-O-methoxyethylribose; note = thymine
  modified_base 14: mod_base = OTHER; mod_base = m5c; note = sugar modification: lna; note = backbone modification: 5'-phosphorothioate
  modified_base 15: mod_base = OTHER; mod_base = m5c; note = sugar modification: lna
tcttgtacttcatcc

SEQ ID NO: 884 - RNA, 15 nt, synthetic construct
  source 1..15: mol_type = other RNA; note = Antisense oligonucleotide
  modified_base 1: mod_base = OTHER; note = backbone modification: 5'-phosphorothioate; note = thymine; note = sugar modification: 2'-O-methoxyethylribose
  modified_base 2: mod_base = OTHER; mod_base = m5c; note = sugar modification: 2'-O-methoxyethylribose; note = backbone modification: 5'-phosphorothioate
  modified_base 3: mod_base = OTHER; note = backbone modification: 5'-phosphorothioate; note = sugar modification: 2'-O-methoxyethylribose; note = thymine
  modified_base 4: mod_base = OTHER; note = sugar modification: 2'-O-methoxyethylribose; note = thymine; note = backbone modification: 5'-phosphorothioate
  modified_base 5: mod_base = OTHER; note = sugar modification: 2'-O-methoxyethylribose; note = backbone modification: 5'-phosphorothioate
  modified_base 6: mod_base = OTHER; note = sugar modification: 2'-O-methoxyethylribose; note = thymine; note = backbone modification: 5'-phosphorothioate
  modified_base 7: mod_base = OTHER; note = sugar modification: 2'-O-methoxyethylribose; note = backbone modification: 5'-phosphorothioate
  modified_base 8: mod_base = m5c; mod_base = OTHER; note = backbone modification: 5'-phosphorothioate; note = sugar modification: 2'-O-methoxyethylribose
  modified_base 9: mod_base = OTHER; note = sugar modification: 2'-O-methoxyethylribose; note = backbone modification: 5'-phosphorothioate; note = thymine
  modified_base 10: mod_base = OTHER; note = sugar modification: 2'-O-methoxyethylribose; note = backbone modification: 5'-phosphorothioate; note = thymine
  modified_base 11: mod_base = OTHER; mod_base = m5c; note = backbone modification: 5'-phosphorothioate; note = sugar modification: 2'-O-methoxyethylribose
  modified_base 12: mod_base = OTHER; note = sugar modification: 2'-O-methoxyethylribose; note = backbone modification: 5'-phosphorothioate
  modified_base 13: mod_base = OTHER; note = sugar modification: lna; note = thymine; note = backbone modification: 5'-phosphorothioate
  modified_base 14: mod_base = m5c; mod_base = OTHER; note = backbone modification: 5'-phosphorothioate; note = sugar modification: lna
  modified_base 15: mod_base = OTHER; mod_base = m5c; note = sugar modification: lna
tcttgtacttcatcc

SEQ ID NO: 885 - RNA, 15 nt, synthetic construct
  source 1..15: mol_type = other RNA; note = Antisense oligonucleotide
  modified_base 1: mod_base = OTHER; note = sugar modification: lna; note = backbone modification: 5'-phosphorothioate; note = thymine
  modified_base 2: mod_base = OTHER; note = sugar modification: 2'-O-methoxyethylribose; note = thymine; note = backbone modification: 5'-phosphorothioate
  modified_base 3: mod_base = m5c; mod_base = OTHER; note = sugar modification: 2'-O-methoxyethylribose; note = backbone modification: 5'-phosphorothioate
  modified_base 4: mod_base = OTHER; note = thymine; note = sugar modification: 2'-O-methoxyethylribose; note = backbone modification: 5'-phosphorothioate
  modified_base 5: mod_base = OTHER; note = thymine; note = backbone modification: 5'-phosphorothioate; note = sugar modification: 2'-O-methoxyethylribose
  modified_base 6: mod_base = OTHER; note = backbone modification: 5'-phosphorothioate; note = sugar modification: 2'-O-methoxyethylribose
  modified_base 7: mod_base = OTHER; note = sugar modification: 2'-O-methoxyethylribose; note = backbone modification: 5'-phosphorothioate; note = thymine
  modified_base 8: mod_base = OTHER; note = sugar modification: 2'-O-methoxyethylribose; note = backbone modification: 5'-phosphorothioate
  modified_base 9: mod_base = m5c; mod_base = OTHER; note = backbone modification: 5'-phosphorothioate; note = sugar modification: 2'-O-methoxyethylribose
  modified_base 10: mod_base = OTHER; note = thymine; note = backbone modification: 5'-phosphorothioate; note = sugar modification: 2'-O-methoxyethylribose
  modified_base 11: mod_base = OTHER; note = thymine; note = sugar modification: 2'-O-methoxyethylribose; note = backbone modification: 5'-phosphorothioate
  modified_base 12: mod_base = m5c; mod_base = OTHER; note = backbone modification: 5'-phosphorothioate; note = sugar modification: 2'-O-methoxyethylribose
  modified_base 13: mod_base = OTHER; note = backbone modification: 5'-phosphorothioate; note = sugar modification: 2'-O-methoxyethylribose
  modified_base 14: mod_base = OTHER; note = backbone modification: 5'-phosphorothioate; note = sugar modification: 2'-O-methoxyethylribose; note = thymine
  modified_base 15: mod_base = m5c; mod_base = OTHER; note = sugar modification: 2'-O-methoxyethylribose
ttcttgtacttcatc

SEQ ID NO: 886 - RNA, 15 nt, synthetic construct
  source 1..15: mol_type = other RNA; note = Antisense oligonucleotide
  modified_base 1: mod_base = OTHER; note = thymine; note = sugar modification: lna; note = backbone modification: 5'-phosphorothioate
  modified_base 2: mod_base = OTHER; note = thymine; note = backbone modification: 5'-phosphorothioate; note = sugar modification: lna
  modified_base 3: mod_base = OTHER; mod_base = m5c; note = sugar modification: 2'-O-methoxyethylribose; note = backbone modification: 5'-phosphorothioate
  modified_base 4: mod_base = OTHER; note = backbone modification: 5'-phosphorothioate; note = thymine; note = sugar modification: 2'-O-methoxyethylribose
  modified_base 5: mod_base = OTHER; note = backbone modification: 5'-phosphorothioate; note = thymine; note = sugar modification: 2'-O-methoxyethylribose
  modified_base 6: mod_base = OTHER; note = sugar modification: 2'-O-methoxyethylribose; note = backbone modification: 5'-phosphorothioate
  modified_base 7: mod_base = OTHER; note = backbone modification: 5'-phosphorothioate; note = sugar modification: 2'-O-methoxyethylribose; note = thymine
  modified_base 8: mod_base = OTHER; note = backbone modification: 5'-phosphorothioate; note = sugar modification: 2'-O-methoxyethylribose
  modified_base 9: mod_base = m5c; mod_base = OTHER; note = backbone modification: 5'-phosphorothioate; note = sugar modification: 2'-O-methoxyethylribose
  modified_base 10: mod_base = OTHER; note = sugar modification: 2'-O-methoxyethylribose; note = thymine; note = backbone modification: 5'-phosphorothioate
  modified_base 11: mod_base = OTHER; note = thymine; note = sugar modification: 2'-O-methoxyethylribose; note = backbone modification: 5'-phosphorothioate
  modified_base 12: mod_base = OTHER; mod_base = m5c; note = backbone modification: 5'-phosphorothioate; note = sugar modification: 2'-O-methoxyethylribose
  modified_base 13: mod_base = OTHER; note = sugar modification: 2'-O-methoxyethylribose; note = backbone modification: 5'-phosphorothioate
  modified_base 14: mod_base = OTHER; note = sugar modification: 2'-O-methoxyethylribose; note = thymine; note = backbone modification: 5'-phosphorothioate
  modified_base 15: mod_base = OTHER; mod_base = m5c; note = sugar modification: 2'-O-methoxyethylribose
ttcttgtacttcatc

SEQ ID NO: 887 - RNA, 15 nt, synthetic construct
  source 1..15: mol_type = other RNA; note = Antisense oligonucleotide
  modified_base 1: mod_base = OTHER; note = sugar modification: lna; note = thymine; note = backbone modification: 5'-phosphorothioate
  modified_base 2: mod_base = OTHER; note = backbone modification: 5'-phosphorothioate; note = sugar modification: lna; note = thymine
  modified_base 3: mod_base = OTHER; mod_base = m5c; note = backbone modification: 5'-phosphorothioate; note = sugar modification: lna
  modified_base 4: mod_base = OTHER; note = backbone modification: 5'-phosphorothioate; note = thymine; note = sugar modification: 2'-O-methoxyethylribose
  modified_base 5: mod_base = OTHER; note = backbone modification: 5'-phosphorothioate; note = thymine; note = sugar modification: 2'-O-methoxyethylribose
  modified_base 6: mod_base = OTHER; note = sugar modification: 2'-O-methoxyethylribose; note = backbone modification: 5'-phosphorothioate
  modified_base 7: mod_base = OTHER; note = sugar modification: 2'-O-methoxyethylribose; note = backbone modification: 5'-phosphorothioate; note = thymine
  modified_base 8: mod_base = OTHER; note = sugar modification: 2'-O-methoxyethylribose; note = backbone modification: 5'-phosphorothioate
  modified_base 9: mod_base = OTHER; mod_base = m5c; note = sugar modification: 2'-O-methoxyethylribose; note = backbone modification: 5'-phosphorothioate
  modified_base 10: mod_base = OTHER; note = thymine; note = sugar modification: 2'-O-methoxyethylribose; note = backbone modification: 5'-phosphorothioate
  modified_base 11: mod_base = OTHER; note = sugar modification: 2'-O-methoxyethylribose; note = backbone modification: 5'-phosphorothioate; note = thymine
  modified_base 12: mod_base = m5c; mod_base = OTHER; note = backbone modification: 5'-phosphorothioate; note = sugar modification: 2'-O-methoxyethylribose
  modified_base 13: mod_base = OTHER; note = sugar modification: 2'-O-methoxyethylribose; note = backbone modification: 5'-phosphorothioate
  modified_base 14: mod_base = OTHER; note = thymine; note = sugar modification: 2'-O-methoxyethylribose; note = backbone modification: 5'-phosphorothioate
  modified_base 15: mod_base = OTHER; mod_base = m5c; note = sugar modification: 2'-O-methoxyethylribose
ttcttgtacttcatc

SEQ ID NO: 888 - RNA, 15 nt, synthetic construct
  source 1..15: mol_type = other RNA; note = Antisense oligonucleotide
  modified_base 1: mod_base = OTHER; note = thymine; note = sugar modification: lna; note = backbone modification: 5'-phosphorothioate
  modified_base 2: mod_base = OTHER; note = thymine; note = backbone modification: 5'-phosphorothioate; note = sugar modification: 2'-O-methoxyethylribose
  modified_base 3: mod_base = m5c; mod_base = OTHER; note = sugar modification: 2'-O-methoxyethylribose; note = backbone modification: 5'-phosphorothioate
  modified_base 4: mod_base = OTHER; note = sugar modification: 2'-O-methoxyethylribose; note = thymine; note = backbone modification: 5'-phosphorothioate
  modified_base 5: mod_base = OTHER; note = sugar modification: 2'-O-methoxyethylribose; note = thymine; note = backbone modification: 5'-phosphorothioate
  modified_base 6: mod_base = OTHER; note = backbone modification: 5'-phosphorothioate; note = sugar modification: 2'-O-methoxyethylribose
  modified_base 7: mod_base = OTHER; note = sugar modification: 2'-O-methoxyethylribose; note = thymine; note = backbone modification: 5'-phosphorothioate
  modified_base 8: mod_base = OTHER; note = sugar modification: 2'-O-methoxyethylribose; note = backbone modification: 5'-phosphorothioate
  modified_base 9: mod_base = m5c; mod_base = OTHER; note = sugar modification: 2'-O-methoxyethylribose; note = backbone modification: 5'-phosphorothioate
  modified_base 10: mod_base = OTHER; note = thymine; note = sugar modification: 2'-O-methoxyethylribose; note = backbone modification: 5'-phosphorothioate
  modified_base 11: mod_base = OTHER; note = thymine; note = sugar modification: 2'-O-methoxyethylribose; note = backbone modification: 5'-phosphorothioate
  modified_base 12: mod_base = m5c; mod_base = OTHER; note = sugar modification: 2'-O-methoxyethylribose; note = backbone modification: 5'-phosphorothioate
  modified_base 13: mod_base = OTHER; note = sugar modification: 2'-O-methoxyethylribose; note = backbone modification: 5'-phosphorothioate
  modified_base 14: mod_base = OTHER; note = sugar modification: 2'-O-methoxyethylribose; note = thymine; note = backbone modification: 5'-phosphorothioate
  modified_base 15: mod_base = m5c; mod_base = OTHER; note = sugar modification: lna
ttcttgtacttcatc

SEQ ID NO: 889 - RNA, 15 nt, synthetic construct
  source 1..15: mol_type = other RNA; note = Antisense oligonucleotide
  modified_base 1: mod_base = OTHER; note = thymine; note = backbone modification: 5'-phosphorothioate; note = sugar modification: lna
  modified_base 2: mod_base = OTHER; note = sugar modification: lna; note = backbone modification: 5'-phosphorothioate; note = thymine
  modified_base 3: mod_base = OTHER; mod_base = m5c; note = backbone modification: 5'-phosphorothioate; note = sugar modification: 2'-O-methoxyethylribose
  modified_base 4: mod_base = OTHER; note = backbone modification: 5'-phosphorothioate; note = sugar modification: 2'-O-methoxyethylribose; note = thymine
  modified_base 5: mod_base = OTHER; note = sugar modification: 2'-O-methoxyethylribose; note = backbone modification: 5'-phosphorothioate; note = thymine
  modified_base 6: mod_base = OTHER; note = sugar modification: 2'-O-methoxyethylribose; note = backbone modification: 5'-phosphorothioate
  modified_base 7: mod_base = OTHER; note = sugar modification: 2'-O-methoxyethylribose; note = thymine; note = backbone modification: 5'-phosphorothioate
  modified_base 8: mod_base = OTHER; note = sugar modification: 2'-O-methoxyethylribose; note = backbone modification: 5'-phosphorothioate
  modified_base 9: mod_base = m5c; mod_base = OTHER; note = backbone modification: 5'-phosphorothioate; note = sugar modification: 2'-O-methoxyethylribose
  modified_base 10: mod_base = OTHER; note = thymine; note = backbone modification: 5'-phosphorothioate; note = sugar modification: 2'-O-methoxyethylribose
  modified_base 11: mod_base = OTHER; note = thymine; note = sugar modification: 2'-O-methoxyethylribose; note = backbone modification: 5'-phosphorothioate
  modified_base 12: mod_base = m5c; mod_base = OTHER; note = sugar modification: 2'-O-methoxyethylribose; note = backbone modification: 5'-phosphorothioate
  modified_base 13: mod_base = OTHER; note = sugar modification: 2'-O-methoxyethylribose; note = backbone modification: 5'-phosphorothioate
  modified_base 14: mod_base = OTHER; note = thymine; note = sugar modification: 2'-O-methoxyethylribose; note = backbone modification: 5'-phosphorothioate
  modified_base 15: mod_base = m5c; mod_base = OTHER; note = sugar modification: lna
ttcttgtacttcatc

SEQ ID NO: 890 - RNA, 15 nt, synthetic construct
  source 1..15: mol_type = other RNA; note = Antisense oligonucleotide
  modified_base 1: mod_base = OTHER; note = backbone modification: 5'-phosphorothioate; note = thymine; note = sugar modification: lna
  modified_base 2: mod_base = OTHER; note = thymine; note = backbone modification: 5'-phosphorothioate; note = sugar modification: lna
  modified_base 3: mod_base = m5c; mod_base = OTHER; note = sugar modification: lna; note = backbone modification: 5'-phosphorothioate
  modified_base 4: mod_base = OTHER; note = sugar modification: 2'-O-methoxyethylribose; note = thymine; note = backbone modification: 5'-phosphorothioate
  modified_base 5: mod_base = OTHER; note = sugar modification: 2'-O-methoxyethylribose; note = backbone modification: 5'-phosphorothioate; note = thymine
  modified_base 6: mod_base = OTHER; note = sugar modification: 2'-O-methoxyethylribose; note = backbone modification: 5'-phosphorothioate
  modified_base 7: mod_base = OTHER; note = thymine; note = backbone modification: 5'-phosphorothioate; note = sugar modification: 2'-O-methoxyethylribose
  modified_base 8: mod_base = OTHER; note = sugar modification: 2'-O-methoxyethylribose; note = backbone modification: 5'-phosphorothioate
  modified_base 9: mod_base = OTHER; mod_base = m5c; note = sugar modification: 2'-O-methoxyethylribose; note = backbone modification: 5'-phosphorothioate
  modified_base 10: mod_base = OTHER; note = thymine; note = backbone modification: 5'-phosphorothioate; note = sugar modification: 2'-O-methoxyethylribose
  modified_base 11: mod_base = OTHER; note = sugar modification: 2'-O-methoxyethylribose; note = thymine; note = backbone modification: 5'-phosphorothioate
  modified_base 12: mod_base = OTHER; mod_base = m5c; note = backbone modification: 5'-phosphorothioate; note = sugar modification: 2'-O-methoxyethylribose
  modified_base 13: mod_base = OTHER; note = sugar modification: 2'-O-methoxyethylribose; note = backbone modification: 5'-phosphorothioate
  modified_base 14: mod_base = OTHER; note = sugar modification: 2'-O-methoxyethylribose; note = backbone modification: 5'-phosphorothioate; note = thymine
  modified_base 15: mod_base = m5c; mod_base = OTHER; note = sugar modification: lna
ttcttgtacttcatc

SEQ ID NO: 891 - RNA, 15 nt, synthetic construct
  source 1..15: mol_type = other RNA; note = Antisense oligonucleotide
  modified_base 1: mod_base = OTHER; note = backbone modification: 5'-phosphorothioate; note = sugar modification: lna; note = thymine
  modified_base 2: mod_base = OTHER; note = thymine; note = sugar modification: 2'-O-methoxyethylribose; note = backbone modification: 5'-phosphorothioate
  modified_base 3: mod_base = m5c; mod_base = OTHER; note = backbone modification: 5'-phosphorothioate; note = sugar modification: 2'-O-methoxyethylribose
  modified_base 4: mod_base = OTHER; note = thymine; note = sugar modification: 2'-O-methoxyethylribose; note = backbone modification: 5'-phosphorothioate
  modified_base 5: mod_base = OTHER; note = sugar modification: 2'-O-methoxyethylribose; note = thymine; note = backbone modification: 5'-phosphorothioate
  modified_base 6: mod_base = OTHER; note = sugar modification: 2'-O-methoxyethylribose; note = backbone modification: 5'-phosphorothioate
  modified_base 7: mod_base = OTHER; note = thymine; note = sugar modification: 2'-O-methoxyethylribose; note = backbone modification: 5'-phosphorothioate
  modified_base 8: mod_base = OTHER; note = backbone modification: 5'-phosphorothioate; note = sugar modification: 2'-O-methoxyethylribose
  modified_base 9: mod_base = m5c; mod_base = OTHER; note = backbone modification: 5'-phosphorothioate; note = sugar modification: 2'-O-methoxyethylribose
  modified_base 10: mod_base = OTHER; note = thymine; note = sugar modification: 2'-O-methoxyethylribose; note = backbone modification: 5'-phosphorothioate
  modified_base 11: mod_base = OTHER; note = backbone modification: 5'-phosphorothioate; note = thymine; note = sugar modification: 2'-O-methoxyethylribose
  modified_base 12: mod_base = OTHER; mod_base = m5c; note = backbone modification: 5'-phosphorothioate; note = sugar modification: 2'-O-methoxyethylribose
  modified_base 13: mod_base = OTHER; note = sugar modification: 2'-O-methoxyethylribose; note = backbone modification: 5'-phosphorothioate
  modified_base 14: mod_base = OTHER; note = backbone modification: 5'-phosphorothioate; note = thymine; note = sugar modification: lna
  modified_base 15: mod_base = OTHER; mod_base = m5c; note = sugar modification: lna
ttcttgtacttcatc

SEQ ID NO: 892 - RNA, 15 nt, synthetic construct
  source 1..15: mol_type = other RNA; note = Antisense oligonucleotide
  modified_base 1: mod_base = OTHER; note = backbone modification: 5'-phosphorothioate; note = thymine; note = sugar modification: lna
  modified_base 2: mod_base = OTHER; note = thymine; note = sugar modification: lna; note = backbone modification: 5'-phosphorothioate
  modified_base 3: mod_base = OTHER; mod_base = m5c; note = backbone modification: 5'-phosphorothioate; note = sugar modification: 2'-O-methoxyethylribose
  modified_base 4: mod_base = OTHER; note = thymine; note = sugar modification: 2'-O-methoxyethylribose; note = backbone modification: 5'-phosphorothioate
  modified_base 5: mod_base = OTHER; note = backbone modification: 5'-phosphorothioate; note = sugar modification: 2'-O-methoxyethylribose; note = thymine
  modified_base 6: mod_base = OTHER; note = sugar modification: 2'-O-methoxyethylribose; note = backbone modification: 5'-phosphorothioate
  modified_base 7: mod_base = OTHER; note = thymine; note = sugar modification: 2'-O-methoxyethylribose; note = backbone modification: 5'-phosphorothioate
  modified_base 8: mod_base = OTHER; note = backbone modification: 5'-phosphorothioate; note = sugar modification: 2'-O-methoxyethylribose
  modified_base 9: mod_base = m5c; mod_base = OTHER; note = backbone modification: 5'-phosphorothioate; note = sugar modification: 2'-O-methoxyethylribose
  modified_base 10: mod_base = OTHER; note = backbone modification: 5'-phosphorothioate; note = sugar modification: 2'-O-methoxyethylribose; note = thymine
  modified_base 11: mod_base = OTHER; note = backbone modification: 5'-phosphorothioate; note = thymine; note = sugar modification: 2'-O-methoxyethylribose
  modified_base 12: mod_base = OTHER; mod_base = m5c; note = backbone modification: 5'-phosphorothioate; note = sugar modification: 2'-O-methoxyethylribose
  modified_base 13: mod_base = OTHER; note = sugar modification: 2'-O-methoxyethylribose; note = backbone modification: 5'-phosphorothioate
  modified_base 14: mod_base = OTHER; note = thymine; note = backbone modification: 5'-phosphorothioate; note = sugar modification: lna
  modified_base 15: mod_base = OTHER; mod_base = m5c; note = sugar modification: lna
ttcttgtacttcatc

SEQ ID NO: 893 - RNA, 15 nt, synthetic construct
  source 1..15: mol_type = other RNA; note = Antisense oligonucleotide
  modified_base 1: mod_base = OTHER; note = backbone modification: 5'-phosphorothioate; note = sugar modification: lna; note = thymine
  modified_base 2: mod_base = OTHER; note = sugar modification: lna; note = thymine; note = backbone modification: 5'-phosphorothioate
  modified_base 3: mod_base = OTHER; mod_base = m5c; note = backbone modification: 5'-phosphorothioate; note = sugar modification: lna
  modified_base 4: mod_base = OTHER; note = thymine; note = backbone modification: 5'-phosphorothioate; note = sugar modification: 2'-O-methoxyethylribose
  modified_base 5: mod_base = OTHER; note = thymine; note = backbone modification: 5'-phosphorothioate; note = sugar modification: 2'-O-methoxyethylribose
  modified_base 6: mod_base = OTHER; note = sugar modification: 2'-O-methoxyethylribose; note = backbone modification: 5'-phosphorothioate
  modified_base 7: mod_base = OTHER; note = sugar modification: 2'-O-methoxyethylribose; note = thymine; note = backbone modification: 5'-phosphorothioate
  modified_base 8: mod_base = OTHER; note = backbone modification: 5'-phosphorothioate; note = sugar modification: 2'-O-methoxyethylribose
  modified_base 9: mod_base = OTHER; mod_base = m5c; note = sugar modification: 2'-O-methoxyethylribose; note = backbone modification: 5'-phosphorothioate
  modified_base 10: mod_base = OTHER; note = thymine; note = backbone modification: 5'-phosphorothioate; note = sugar modification: 2'-O-methoxyethylribose
  modified_base 11: mod_base = OTHER; note = thymine; note = backbone modification: 5'-phosphorothioate; note = sugar modification: 2'-O-methoxyethylribose
  modified_base 12: mod_base = OTHER; mod_base = m5c; note = sugar modification: 2'-O-methoxyethylribose; note = backbone modification: 5'-phosphorothioate
  modified_base 13: mod_base = OTHER; note = sugar modification: 2'-O-methoxyethylribose; note = backbone modification: 5'-phosphorothioate
  modified_base 14: mod_base = OTHER; note = backbone modification: 5'-phosphorothioate; note = sugar modification: lna; note = thymine
  modified_base 15: mod_base = m5c; mod_base = OTHER; note = sugar modification: lna
ttcttgtacttcatc

SEQ ID NO: 894 - RNA, 15 nt, synthetic construct
  source 1..15: mol_type = other RNA; note = Antisense oligonucleotide
  modified_base 1: mod_base = OTHER; note = thymine; note = backbone modification: 5'-phosphorothioate; note = sugar modification: lna
  modified_base 2: mod_base = OTHER; note = thymine; note = backbone modification: 5'-phosphorothioate; note = sugar modification: 2'-O-methoxyethylribose
  modified_base 3: mod_base = m5c; mod_base = OTHER; note = backbone modification: 5'-phosphorothioate; note = sugar modification: 2'-O-methoxyethylribose
  modified_base 4: mod_base = OTHER; note = sugar modification: 2'-O-methoxyethylribose; note = backbone modification: 5'-phosphorothioate; note = thymine
  modified_base 5: mod_base = OTHER; note = backbone modification: 5'-phosphorothioate; note = sugar modification: 2'-O-methoxyethylribose; note = thymine
  modified_base 6: mod_base = OTHER; note = backbone modification: 5'-phosphorothioate; note = sugar modification: 2'-O-methoxyethylribose
  modified_base 7: mod_base = OTHER; note = backbone modification: 5'-phosphorothioate; note = thymine; note = sugar modification: 2'-O-methoxyethylribose
  modified_base 8: mod_base = OTHER; note = backbone modification: 5'-phosphorothioate; note = sugar modification: 2'-O-methoxyethylribose
  modified_base 9: mod_base = OTHER; mod_base = m5c; note = backbone modification: 5'-phosphorothioate; note = sugar modification: 2'-O-methoxyethylribose
  modified_base 10: mod_base = OTHER; note = thymine; note = backbone modification: 5'-phosphorothioate; note = sugar modification: 2'-O-methoxyethylribose
  modified_base 11: mod_base = OTHER; note = backbone modification: 5'-phosphorothioate; note = thymine; note = sugar modification: 2'-O-methoxyethylribose
  modified_base 12: mod_base = OTHER; mod_base = m5c; note = backbone modification: 5'-phosphorothioate; note = sugar modification: 2'-O-methoxyethylribose
  modified_base 13: mod_base = OTHER; note = backbone modification: 5'-phosphorothioate; note = sugar modification: lna
  modified_base 14: mod_base = OTHER; note = backbone modification: 5'-phosphorothioate; note = sugar modification: lna; note = thymine
  modified_base 15: mod_base = OTHER; mod_base = m5c; note = sugar modification: lna
ttcttgtacttcatc

SEQ ID NO: 895 - RNA, 15 nt, synthetic construct
  source 1..15: mol_type = other RNA; note = Antisense oligonucleotide
  modified_base 1: mod_base = OTHER; note = backbone modification: 5'-phosphorothioate; note = thymine; note = sugar modification: lna
  modified_base 2: mod_base = OTHER; note = thymine; note = backbone modification: 5'-phosphorothioate; note = sugar modification: lna
  modified_base 3: mod_base = m5c; mod_base = OTHER; note = backbone modification: 5'-phosphorothioate; note = sugar modification: 2'-O-methoxyethylribose
  modified_base 4: mod_base = OTHER; note = thymine; note = backbone modification: 5'-phosphorothioate; note = sugar modification: 2'-O-methoxyethylribose
  modified_base 5: mod_base = OTHER; note = sugar modification: 2'-O-methoxyethylribose; note = backbone modification: 5'-phosphorothioate; note = thymine
  modified_base 6: mod_base = OTHER; note = sugar modification: 2'-O-methoxyethylribose; note = backbone modification: 5'-phosphorothioate
  modified_base 7: mod_base = OTHER; note = thymine; note = sugar modification: 2'-O-methoxyethylribose; note = backbone modification: 5'-phosphorothioate
  modified_base 8: mod_base = OTHER; note = backbone modification: 5'-phosphorothioate; note = sugar modification: 2'-O-methoxyethylribose
  modified_base 9: mod_base = m5c; mod_base = OTHER; note = backbone modification: 5'-phosphorothioate; note = sugar modification: 2'-O-methoxyethylribose
  modified_base 10: mod_base = OTHER; note = thymine; note = backbone modification: 5'-phosphorothioate; note = sugar modification: 2'-O-methoxyethylribose
  modified_base 11: mod_base = OTHER; note = thymine; note = sugar modification: 2'-O-methoxyethylribose; note = backbone modification: 5'-phosphorothioate
  modified_base 12: mod_base = m5c; mod_base = OTHER; note = sugar modification: 2'-O-methoxyethylribose; note = backbone modification: 5'-phosphorothioate
  modified_base 13: mod_base = OTHER; note = sugar modification: lna; note = backbone modification: 5'-phosphorothioate
  modified_base 14: mod_base = OTHER; note = sugar modification: lna; note = backbone modification: 5'-phosphorothioate; note = thymine
  modified_base 15: mod_base = OTHER; mod_base = m5c; note = sugar modification: lna
ttcttgtacttcatc

SEQ ID NO: 896 - RNA, 15 nt, synthetic construct
  source 1..15: mol_type = other RNA; note = Antisense oligonucleotide
  modified_base 1: mod_base = OTHER; note = backbone modification: 5'-phosphorothioate; note = sugar modification: 2'-O-methoxyethylribose; note = thymine
  modified_base 2: mod_base = OTHER; note = thymine; note = backbone modification: 5'-phosphorothioate; note = sugar modification: 2'-O-methoxyethylribose
  modified_base 3: mod_base = OTHER; mod_base = m5c; note = sugar modification: 2'-O-methoxyethylribose; note = backbone modification: 5'-phosphorothioate
  modified_base 4: mod_base = OTHER; note = backbone modification: 5'-phosphorothioate; note = thymine; note = sugar modification: 2'-O-methoxyethylribose
  modified_base 5: mod_base = OTHER; note = sugar modification: 2'-O-methoxyethylribose; note = backbone modification: 5'-phosphorothioate; note = thymine
  modified_base 6: mod_base = OTHER; note = sugar modification: 2'-O-methoxyethylribose; note = backbone modification: 5'-phosphorothioate
  modified_base 7: mod_base = OTHER; note = thymine; note = sugar modification: 2'-O-methoxyethylribose; note = backbone modification: 5'-phosphorothioate
  modified_base 8: mod_base = OTHER; note = sugar modification: 2'-O-methoxyethylribose; note = backbone modification: 5'-phosphorothioate
  modified_base 9: mod_base = OTHER; mod_base = m5c; note = backbone modification: 5'-phosphorothioate; note = sugar modification: 2'-O-methoxyethylribose
  modified_base 10: mod_base = OTHER; note = backbone modification: 5'-phosphorothioate; note = sugar modification: 2'-O-methoxyethylribose; note = thymine
  modified_base 11: mod_base = OTHER; note = backbone modification: 5'-phosphorothioate; note = sugar modification: 2'-O-methoxyethylribose; note = thymine
  modified_base 12: mod_base = OTHER; mod_base = m5c; note = sugar modification: 2'-O-methoxyethylribose; note = backbone modification: 5'-phosphorothioate
  modified_base 13: mod_base = OTHER; note = sugar modification: 2'-O-methoxyethylribose; note = backbone modification: 5'-phosphorothioate
  modified_base 14: mod_base = OTHER; note = sugar modification: 2'-O-methoxyethylribose; note = thymine; note = backbone modification: 5'-phosphorothioate
  modified_base 15: mod_base = m5c; mod_base = OTHER; note = sugar modification: lna
ttcttgtacttcatc

SEQ ID NO: 897 - RNA, 15 nt, synthetic construct
  source 1..15: mol_type = other RNA; note = Antisense oligonucleotide
  modified_base 1: mod_base = OTHER; note = sugar modification: 2'-O-methoxyethylribose; note = backbone modification: 5'-phosphorothioate; note = thymine
  modified_base 2: mod_base = OTHER; note = sugar modification: 2'-O-methoxyethylribose; note = backbone modification: 5'-phosphorothioate; note = thymine
  modified_base 3: mod_base = m5c; mod_base = OTHER; note = backbone modification: 5'-phosphorothioate; note = sugar modification: 2'-O-methoxyethylribose
  modified_base 4: mod_base = OTHER; note = sugar modification: 2'-O-methoxyethylribose; note = thymine; note = backbone modification: 5'-phosphorothioate
  modified_base 5: mod_base = OTHER; note = thymine; note = sugar modification: 2'-O-methoxyethylribose; note = backbone modification: 5'-phosphorothioate
  modified_base 6: mod_base = OTHER; note = backbone modification: 5'-phosphorothioate; note = sugar modification: 2'-O-methoxyethylribose
  modified_base 7: mod_base = OTHER; note = thymine; note = sugar modification: 2'-O-methoxyethylribose; note = backbone modification: 5'-phosphorothioate
  modified_base 8: mod_base = OTHER; note = sugar modification: 2'-O-methoxyethylribose; note = backbone modification: 5'-phosphorothioate
  modified_base 9: mod_base = m5c; mod_base = OTHER; note = backbone modification: 5'-phosphorothioate; note = sugar modification: 2'-O-methoxyethylribose
  modified_base 10: mod_base = OTHER; note = backbone modification: 5'-phosphorothioate; note = thymine; note = sugar modification: 2'-O-methoxyethylribose
  modified_base 11: mod_base = OTHER; note = backbone modification: 5'-phosphorothioate; note = thymine; note = sugar modification: 2'-O-methoxyethylribose
  modified_base 12: mod_base = OTHER; mod_base = m5c; note = backbone modification: 5'-phosphorothioate; note = sugar modification: 2'-O-methoxyethylribose
  modified_base 13: mod_base = OTHER; note = sugar modification: 2'-O-methoxyethylribose; note = backbone modification: 5'-phosphorothioate
  modified_base 14: mod_base = OTHER; note = backbone modification: 5'-phosphorothioate; note = sugar modification: lna; note = thymine
  modified_base 15: mod_base = m5c; mod_base = OTHER; note = sugar modification: lna
ttcttgtacttcatc

SEQ ID NO: 898 - RNA, 15 nt, synthetic construct
  source 1..15: mol_type = other RNA; note = Antisense oligonucleotide
  modified_base 1: mod_base = OTHER; note = backbone modification: 5'-phosphorothioate; note = thymine; note = sugar modification: 2'-O-methoxyethylribose
  modified_base 2: mod_base = OTHER; note = sugar modification: 2'-O-methoxyethylribose; note = thymine; note = backbone modification: 5'-phosphorothioate
  modified_base 3: mod_base = OTHER; mod_base = m5c; note = sugar modification: 2'-O-methoxyethylribose; note = backbone modification: 5'-phosphorothioate
  modified_base 4: mod_base = OTHER; note = sugar modification: 2'-O-methoxyethylribose; note = thymine; note = backbone modification: 5'-phosphorothioate
  modified_base 5: mod_base = OTHER; note = thymine; note = backbone modification: 5'-phosphorothioate; note = sugar modification: 2'-O-methoxyethylribose
  modified_base 6: mod_base = OTHER; note = backbone modification: 5'-phosphorothioate; note = sugar modification: 2'-O-methoxyethylribose
  modified_base 7: mod_base = OTHER; note = thymine; note = backbone modification: 5'-phosphorothioate; note = sugar modification: 2'-O-methoxyethylribose
  modified_base 8: mod_base = OTHER; note = sugar modification: 2'-O-methoxyethylribose; note = backbone modification: 5'-phosphorothioate
  modified_base 9: mod_base = m5c; mod_base = OTHER; note = sugar modification: 2'-O-methoxyethylribose; note = backbone modification: 5'-phosphorothioate
  modified_base 10: mod_base = OTHER; note = backbone modification: 5'-phosphorothioate; note = sugar modification: 2'-O-methoxyethylribose; note = thymine
  modified_base 11: mod_base = OTHER; note = thymine; note = sugar modification: 2'-O-methoxyethylribose; note = backbone modification: 5'-phosphorothioate
  modified_base 12: mod_base = OTHER; mod_base = m5c; note = backbone modification: 5'-phosphorothioate; note = sugar modification: 2'-O-methoxyethylribose
  modified_base 13: mod_base = OTHER; note = sugar modification: lna; note = backbone modification: 5'-phosphorothioate
  modified_base 14: mod_base = OTHER; note = sugar modification: lna; note = thymine; note = backbone modification: 5'-phosphorothioate
  modified_base 15: mod_base = m5c; mod_base = OTHER; note = sugar modification: lna
ttcttgtacttcatc

SEQ ID NO: 899 - RNA, 15 nt, synthetic construct
  source 1..15: mol_type = other RNA; note = Antisense oligonucleotide
  modified_base 1: mod_base = OTHER; note = sugar modification: lna; note = backbone modification: 5'-phosphorothioate
  modified_base 2: mod_base = OTHER; note = sugar modification: 2'-O-methoxyethylribose; note = thymine; note = backbone modification: 5'-phosphorothioate
  modified_base 3: mod_base = OTHER; note = thymine; note = sugar modification: 2'-O-methoxyethylribose; note = backbone modification: 5'-phosphorothioate
  modified_base 4: mod_base = m5c; mod_base = OTHER; note = backbone modification: 5'-phosphorothioate; note = sugar modification: 2'-O-methoxyethylribose
  modified_base 5: mod_base = OTHER; note = backbone modification: 5'-phosphorothioate; note = thymine; note = sugar modification: 2'-O-methoxyethylribose
  modified_base 6: mod_base = OTHER; note = backbone modification: 5'-phosphorothioate; note = thymine; note = sugar modification: 2'-O-methoxyethylribose
  modified_base 7: mod_base = OTHER; note = sugar modification: 2'-O-methoxyethylribose; note = backbone modification: 5'-phosphorothioate
  modified_base 8: mod_base = OTHER; note = sugar modification: 2'-O-methoxyethylribose; note = thymine; note = backbone modification: 5'-phosphorothioate
  modified_base 9: mod_base = OTHER; note = backbone modification: 5'-phosphorothioate; note = sugar modification: 2'-O-methoxyethylribose
  modified_base 10: mod_base = OTHER; mod_base = m5c; note = sugar modification: 2'-O-methoxyethylribose; note = backbone modification: 5'-phosphorothioate
  modified_base 11: mod_base = OTHER; note = sugar modification: 2'-O-methoxyethylribose; note = thymine; note = backbone modification: 5'-phosphorothioate
  modified_base 12: mod_base = OTHER; note = thymine; note = sugar modification: 2'-O-methoxyethylribose; note = backbone modification: 5'-phosphorothioate
  modified_base 13: mod_base = OTHER; mod_base = m5c; note = backbone modification: 5'-phosphorothioate; note = sugar modification: 2'-O-methoxyethylribose
  modified_base 14: mod_base = OTHER; note = sugar modification: 2'-O-methoxyethylribose; note = backbone modification: 5'-phosphorothioate
  modified_base 15: mod_base = OTHER; note = thymine; note = sugar modification: 2'-O-methoxyethylribose
gttcttgtacttcat

SEQ ID NO: 900 - RNA, 15 nt, synthetic construct
  source 1..15: mol_type = other RNA; note = Antisense oligonucleotide
  modified_base 1: mod_base = OTHER; note = backbone modification: 5'-phosphorothioate; note = sugar modification: lna
  modified_base 2: mod_base = OTHER; note = thymine; note = backbone modification: 5'-phosphorothioate; note = sugar modification: lna
  modified_base 3: mod_base = OTHER; note = backbone modification: 5'-phosphorothioate; note = thymine; note = sugar modification: 2'-O-methoxyethylribose
  modified_base 4: mod_base = OTHER; mod_base = m5c; note = sugar modification: 2'-O-methoxyethylribose; note = backbone modification: 5'-phosphorothioate
  modified_base 5: mod_base = OTHER; note = thymine; note = sugar modification: 2'-O-methoxyethylribose; note = backbone modification: 5'-phosphorothioate
  modified_base 6: mod_base = OTHER; note = backbone modification: 5'-phosphorothioate; note = thymine; note = sugar modification: 2'-O-methoxyethylribose
  modified_base 7: mod_base = OTHER; note = backbone modification: 5'-phosphorothioate; note = sugar modification: 2'-O-methoxyethylribose
  modified_base 8: mod_base = OTHER; note = sugar modification: 2'-O-methoxyethylribose; note = backbone modification: 5'-phosphorothioate; note = thymine
  modified_base 9: mod_base = OTHER; note = backbone modification: 5'-phosphorothioate; note = sugar modification: 2'-O-methoxyethylribose
  modified_base 10: mod_base = OTHER; mod_base = m5c; note = backbone modification: 5'-phosphorothioate; note = sugar modification: 2'-O-methoxyethylribose
  modified_base 11: mod_base = OTHER; note = thymine; note = sugar modification: 2'-O-methoxyethylribose; note = backbone modification: 5'-phosphorothioate
  modified_base 12: mod_base = OTHER; note = backbone modification: 5'-phosphorothioate; note = sugar modification: 2'-O-methoxyethylribose; note = thymine
  modified_base 13: mod_base = OTHER; mod_base = m5c; note = sugar modification: 2'-O-methoxyethylribose; note = backbone modification: 5'-phosphorothioate
  modified_base 14: mod_base = OTHER; note = backbone modification: 5'-phosphorothioate; note = sugar modification: 2'-O-methoxyethylribose
  modified_base 15: mod_base = OTHER; note = sugar modification: 2'-O-methoxyethylribose; note = thymine
gttcttgtacttcat

SEQ ID NO: 901 - RNA, 15 nt, synthetic construct
  source 1..15: mol_type = other RNA; note = Antisense oligonucleotide
  modified_base 1: mod_base = OTHER; note = sugar modification: lna; note = backbone modification: 5'-phosphorothioate
  modified_base 2: mod_base = OTHER; note = sugar modification: lna; note = thymine; note = backbone modification: 5'-phosphorothioate
  modified_base 3: mod_base = OTHER; note = thymine; note = sugar modification: lna; note = backbone modification: 5'-phosphorothioate
  modified_base 4: mod_base = OTHER; mod_base = m5c; note = sugar modification: 2'-O-methoxyethylribose; note = backbone modification: 5'-phosphorothioate
  modified_base 5: mod_base = OTHER; note = sugar modification: 2'-O-methoxyethylribose; note = thymine; note = backbone modification: 5'-phosphorothioate
  modified_base 6: mod_base = OTHER; note = thymine; note = backbone modification: 5'-phosphorothioate; note = sugar modification: 2'-O-methoxyethylribose
  modified_base 7: mod_base = OTHER; note = sugar modification: 2'-O-methoxyethylribose; note = backbone modification: 5'-phosphorothioate
  modified_base 8: mod_base = OTHER; note = sugar modification: 2'-O-methoxyethylribose; note = backbone modification: 5'-phosphorothioate; note = thymine
  modified_base 9: mod_base = OTHER; note = sugar modification: 2'-O-methoxyethylribose; note = backbone modification: 5'-phosphorothioate
  modified_base 10: mod_base = m5c; mod_base = OTHER; note = sugar modification: 2'-O-methoxyethylribose; note = backbone modification: 5'-phosphorothioate
  modified_base 11: mod_base = OTHER; note = sugar modification: 2'-O-methoxyethylribose; note = thymine; note = backbone modification: 5'-phosphorothioate
  modified_base 12: mod_base = OTHER; note = sugar modification: 2'-O-methoxyethylribose; note = backbone modification: 5'-phosphorothioate; note = thymine
  modified_base 13: mod_base = m5c; mod_base = OTHER; note = sugar modification: 2'-O-methoxyethylribose; note = backbone modification: 5'-phosphorothioate
  modified_base 14: mod_base = OTHER; note = sugar modification: 2'-O-methoxyethylribose; note = backbone modification: 5'-phosphorothioate
  modified_base 15: mod_base = OTHER; note = thymine; note = sugar modification: 2'-O-methoxyethylribose
gttcttgtacttcat

SEQ ID NO: 902 - RNA, 15 nt, synthetic construct
  source 1..15: mol_type = other RNA; note = Antisense oligonucleotide
  modified_base 1: mod_base = OTHER; note = backbone modification: 5'-phosphorothioate; note = sugar modification: 2'-O-methoxyethylribose
  modified_base 2: mod_base = OTHER; note = sugar modification: 2'-O-methoxyethylribose; note = backbone modification: 5'-phosphorothioate; note = thymine
  modified_base 3: mod_base = OTHER; note = backbone modification: 5'-phosphorothioate; note = thymine; note = sugar modification: 2'-O-methoxyethylribose
  modified_base 4: mod_base = m5c; mod_base = OTHER; note = backbone modification: 5'-phosphorothioate; note = sugar modification: 2'-O-methoxyethylribose
  modified_base 5: mod_base = OTHER; note = backbone modification: 5'-phosphorothioate; note = thymine; note = sugar modification: 2'-O-methoxyethylribose
  modified_base 6: mod_base = OTHER; note = sugar modification: 2'-O-methoxyethylribose; note = thymine; note = backbone modification: 5'-phosphorothioate
  modified_base 7: mod_base = OTHER; note = sugar modification: 2'-O-methoxyethylribose; note = backbone modification: 5'-phosphorothioate
  modified_base 8: mod_base = OTHER; note = backbone modification: 5'-phosphorothioate; note = thymine; note = sugar modification: 2'-O-methoxyethylribose
  modified_base 9: mod_base = OTHER; note = backbone modification: 5'-phosphorothioate; note = sugar modification: 2'-O-methoxyethylribose
  modified_base 10: mod_base = OTHER; mod_base = m5c; note = backbone modification: 5'-phosphorothioate; note = sugar modification: 2'-O-methoxyethylribose
  modified_base 11: mod_base = OTHER; note = thymine; note = sugar modification: 2'-O-methoxyethylribose; note = backbone modification: 5'-phosphorothioate
  modified_base 12: mod_base = OTHER; note = sugar modification: 2'-O-methoxyethylribose; note = thymine; note = backbone modification: 5'-phosphorothioate
  modified_base 13: mod_base = m5c; mod_base = OTHER; note = backbone modification: 5'-phosphorothioate; note = sugar modification: 2'-O-methoxyethylribose
  modified_base 14: mod_base = OTHER; note = backbone modification: 5'-phosphorothioate; note = sugar modification: 2'-O-methoxyethylribose
  modified_base 15: mod_base = OTHER; note = sugar modification: lna; note = thymine
gttcttgtacttcat

SEQ ID NO: 903 - RNA, 15 nt, synthetic construct
  source 1..15: mol_type = other RNA; note = Antisense oligonucleotide
  modified_base 1: mod_base = OTHER; note = sugar modification: 2'-O-methoxyethylribose; note = backbone modification: 5'-phosphorothioate
  modified_base 2: mod_base = OTHER; note = sugar modification: 2'-O-methoxyethylribose; note = backbone modification: 5'-phosphorothioate; note = thymine
  modified_base 3: mod_base = OTHER; note = backbone modification: 5'-phosphorothioate; note = thymine; note = sugar modification: 2'-O-methoxyethylribose
  modified_base 4: mod_base = OTHER; mod_base = m5c; note = sugar modification: 2'-O-methoxyethylribose; note = backbone modification: 5'-phosphorothioate
  modified_base 5: mod_base = OTHER; note = thymine; note = backbone modification: 5'-phosphorothioate; note = sugar modification: 2'-O-methoxyethylribose
  modified_base 6: mod_base = OTHER; note = thymine; note = sugar modification: 2'-O-methoxyethylribose; note = backbone modification: 5'-phosphorothioate
  modified_base 7: mod_base = OTHER; note = sugar modification: 2'-O-methoxyethylribose; note = backbone modification: 5'-phosphorothioate
  modified_base 8: mod_base = OTHER; note = sugar modification: 2'-O-methoxyethylribose; note = backbone modification: 5'-phosphorothioate; note = thymine
  modified_base 9: mod_base = OTHER; note = sugar modification: 2'-O-methoxyethylribose; note = backbone modification: 5'-phosphorothioate
  modified_base 10: mod_base = m5c; mod_base = OTHER; note = backbone modification: 5'-phosphorothioate; note = sugar modification: 2'-O-methoxyethylribose
  modified_base 11: mod_base = OTHER; note = sugar modification: 2'-O-methoxyethylribose; note = thymine; note = backbone modification: 5'-phosphorothioate
  modified_base 12: mod_base = OTHER; note = backbone modification: 5'-phosphorothioate; note = sugar modification: 2'-O-methoxyethylribose; note = thymine
  modified_base 13: mod_base = m5c; mod_base = OTHER; note = backbone modification: 5'-phosphorothioate; note = sugar modification: 2'-O-methoxyethylribose
  modified_base 14: mod_base = OTHER; note = sugar modification: lna; note = backbone modification: 5'-phosphorothioate
  modified_base 15: mod_base = OTHER; note = sugar modification: lna; note = thymine
gttcttgtacttcat

SEQ ID NO: 904 - RNA, 15 nt, synthetic construct
  source 1..15: mol_type = other RNA; note = Antisense oligonucleotide
  modified_base 1: mod_base = OTHER; note = backbone modification: 5'-phosphorothioate; note = sugar modification: 2'-O-methoxyethylribose
  modified_base 2: mod_base = OTHER; note = backbone modification: 5'-phosphorothioate; note = sugar modification: 2'-O-methoxyethylribose; note = thymine
  modified_base 3: mod_base = OTHER; note = backbone modification: 5'-phosphorothioate; note = thymine; note = sugar modification: 2'-O-methoxyethylribose
  modified_base 4: mod_base = m5c; mod_base = OTHER; note = backbone modification: 5'-phosphorothioate; note = sugar modification: 2'-O-methoxyethylribose
  modified_base 5: mod_base = OTHER; note = sugar modification: 2'-O-methoxyethylribose; note = backbone modification: 5'-phosphorothioate; note = thymine
  modified_base 6: mod_base = OTHER; note = thymine; note = sugar modification: 2'-O-methoxyethylribose; note = backbone modification: 5'-phosphorothioate
  modified_base 7: mod_base = OTHER; note = sugar modification: 2'-O-methoxyethylribose; note = backbone modification: 5'-phosphorothioate
  modified_base 8: mod_base = OTHER; note = sugar modification: 2'-O-methoxyethylribose; note = thymine; note = backbone modification: 5'-phosphorothioate
  modified_base 9: mod_base = OTHER; note = sugar modification: 2'-O-methoxyethylribose; note = backbone modification: 5'-phosphorothioate
  modified_base 10: mod_base = m5c; mod_base = OTHER; note = backbone modification: 5'-phosphorothioate; note = sugar modification: 2'-O-methoxyethylribose
  modified_base 11: mod_base = OTHER; note = backbone modification: 5'-phosphorothioate; note = thymine; note = sugar modification: 2'-O-methoxyethylribose
  modified_base 12: mod_base = OTHER; note = backbone modification: 5'-phosphorothioate; note = thymine; note = sugar modification: 2'-O-methoxyethylribose
  modified_base 13: mod_base = m5c; mod_base = OTHER; note = sugar modification: lna; note = backbone modification: 5'-phosphorothioate
  modified_base 14: mod_base = OTHER; note = backbone modification: 5'-phosphorothioate; note = sugar modification: lna
  modified_base 15: mod_base = OTHER; note = sugar modification: lna; note = thymine
gttcttgtacttcat

SEQ ID NO: 905 - RNA, 16 nt, synthetic construct
  source 1..16: mol_type = other RNA; note = Antisense oligonucleotide
  modified_base 1: mod_base = m5c; mod_base = OTHER; note = backbone modification: 5'-phosphorothioate; note = sugar modification: lna
  modified_base 2: mod_base = OTHER; note = thymine; note = sugar modification: 2'-O-methoxyethylribose; note = backbone modification: 5'-phosphorothioate
  modified_base 3: mod_base = OTHER; note = backbone modification: 5'-phosphorothioate; note = sugar modification: 2'-O-methoxyethylribose; note = thymine
  modified_base 4: mod_base = OTHER; note = sugar modification: 2'-O-methoxyethylribose; note = backbone modification: 5'-phosphorothioate
  modified_base 5: mod_base = OTHER; note = thymine; note = backbone modification: 5'-phosphorothioate; note = sugar modification: 2'-O-methoxyethylribose
  modified_base 6: mod_base = OTHER; note = sugar modification: 2'-O-methoxyethylribose; note = backbone modification: 5'-phosphorothioate
  modified_base 7: mod_base = OTHER; mod_base = m5c; note = sugar modification: 2'-O-methoxyethylribose; note = backbone modification: 5'-phosphorothioate
  modified_base 8: mod_base = OTHER; note = thymine; note = sugar modification: 2'-O-methoxyethylribose; note = backbone modification: 5'-phosphorothioate
  modified_base 9: mod_base = OTHER; note = sugar modification: 2'-O-methoxyethylribose; note = backbone modification: 5'-phosphorothioate; note = thymine
  modified_base 10: mod_base = OTHER; mod_base = m5c; note = sugar modification: 2'-O-methoxyethylribose; note = backbone modification: 5'-phosphorothioate
  modified_base 11: mod_base = OTHER; note = backbone modification: 5'-phosphorothioate; note = sugar modification: 2'-O-methoxyethylribose
  modified_base 12: mod_base = OTHER; note = backbone modification: 5'-phosphorothioate; note = sugar modification: 2'-O-methoxyethylribose; note = thymine
  modified_base 13: mod_base = OTHER; mod_base = m5c; note = backbone modification: 5'-phosphorothioate; note = sugar modification: 2'-O-methoxyethylribose
  modified_base 14: mod_base = OTHER; mod_base = m5c; note = sugar modification: 2'-O-methoxyethylribose; note = backbone modification: 5'-phosphorothioate
  modified_base 15: mod_base = m5c; mod_base = OTHER; note = backbone modification: 5'-phosphorothioate; note = sugar modification: 2'-O-methoxyethylribose
  modified_base 16: mod_base = OTHER; note = sugar modification: 2'-O-methoxyethylribose
cttgtacttcatccca

SEQ ID NO: 906 - RNA, 16 nt, synthetic construct
  source 1..16: mol_type = other RNA; note = Antisense oligonucleotide
  modified_base 1: mod_base = OTHER; mod_base = m5c; note = sugar modification: lna; note = backbone modification: 5'-phosphorothioate
  modified_base 2: mod_base = OTHER; note = backbone modification: 5'-phosphorothioate; note = thymine; note = sugar modification: lna
  modified_base 3: mod_base = OTHER; note = thymine; note = backbone modification: 5'-phosphorothioate; note = sugar modification: 2'-O-methoxyethylribose
  modified_base 4: mod_base = OTHER; note = sugar modification: 2'-O-methoxyethylribose; note = backbone modification: 5'-phosphorothioate
  modified_base 5: mod_base = OTHER; note = thymine; note = backbone modification: 5'-phosphorothioate; note = sugar modification: 2'-O-methoxyethylribose
  modified_base 6: mod_base = OTHER; note = sugar modification: 2'-O-methoxyethylribose; note = backbone modification: 5'-phosphorothioate
  modified_base 7: mod_base = OTHER; mod_base = m5c; note = backbone modification: 5'-phosphorothioate; note = sugar modification: 2'-O-methoxyethylribose
  modified_base 8: mod_base = OTHER; note = backbone modification: 5'-phosphorothioate; note = sugar modification: 2'-O-methoxyethylribose; note = thymine
  modified_base 9: mod_base = OTHER; note = sugar modification: 2'-O-methoxyethylribose; note = backbone modification: 5'-phosphorothioate; note = thymine
  modified_base 10: mod_base = m5c; mod_base = OTHER; note = backbone modification: 5'-phosphorothioate; note = sugar modification: 2'-O-methoxyethylribose
  modified_base 11: mod_base = OTHER; note = backbone modification: 5'-phosphorothioate; note = sugar modification: 2'-O-methoxyethylribose
  modified_base 12: mod_base = OTHER; note = backbone modification: 5'-phosphorothioate; note = thymine; note = sugar modification: 2'-O-methoxyethylribose
  modified_base 13: mod_base = m5c; mod_base = OTHER; note = sugar modification: 2'-O-methoxyethylribose; note = backbone modification: 5'-phosphorothioate
  modified_base 14: mod_base = OTHER; mod_base = m5c; note = sugar modification: 2'-O-methoxyethylribose; note = backbone modification: 5'-phosphorothioate
  modified_base 15: mod_base = OTHER; mod_base = m5c; note = sugar modification: 2'-O-methoxyethylribose; note = backbone modification: 5'-phosphorothioate
  modified_base 16: mod_base = OTHER; note = sugar modification: 2'-O-methoxyethylribose
cttgtacttcatccca

SEQ ID NO: 907 - RNA, 16 nt, synthetic construct
  source 1..16: mol_type = other RNA; note = Antisense oligonucleotide
  modified_base 1: mod_base = OTHER; mod_base = m5c; note = sugar modification: lna; note = backbone modification: 5'-phosphorothioate
  modified_base 2: mod_base = OTHER; note = thymine; note = backbone modification: 5'-phosphorothioate; note = sugar modification: lna
  modified_base 3: mod_base = OTHER; note = thymine; note = sugar modification: lna; note = backbone modification: 5'-phosphorothioate
  modified_base 4: mod_base = OTHER; note = sugar modification: 2'-O-methoxyethylribose; note = backbone modification: 5'-phosphorothioate
  modified_base 5: mod_base = OTHER; note = thymine; note = sugar modification: 2'-O-methoxyethylribose; note = backbone modification: 5'-phosphorothioate
  modified_base 6: mod_base = OTHER; note = sugar modification: 2'-O-methoxyethylribose; note = backbone modification: 5'-phosphorothioate
  modified_base 7: mod_base = m5c; mod_base = OTHER; note = backbone modification: 5'-phosphorothioate; note = sugar modification: 2'-O-methoxyethylribose
  modified_base 8: mod_base = OTHER; note = sugar modification: 2'-O-methoxyethylribose; note = backbone modification: 5'-phosphorothioate; note = thymine
  modified_base 9: mod_base = OTHER; note = sugar modification: 2'-O-methoxyethylribose; note = thymine; note = backbone modification: 5'-phosphorothioate
  modified_base 10: mod_base = OTHER; mod_base = m5c; note = backbone modification: 5'-phosphorothioate; note = sugar modification: 2'-O-methoxyethylribose
  modified_base 11: mod_base = OTHER; note = backbone modification: 5'-phosphorothioate; note = sugar modification: 2'-O-methoxyethylribose
  modified_base 12: mod_base = OTHER; note = sugar modification: 2'-O-methoxyethylribose; note = backbone modification: 5'-phosphorothioate; note = thymine
  modified_base 13: mod_base = OTHER; mod_base = m5c; note = sugar modification: 2'-O-methoxyethylribose; note = backbone modification: 5'-phosphorothioate
  modified_base 14: mod_base = OTHER; mod_base = m5c; note = backbone modification: 5'-phosphorothioate; note = sugar modification: 2'-O-methoxyethylribose
  modified_base 15: mod_base = OTHER; mod_base = m5c; note = backbone modification: 5'-phosphorothioate; note = sugar modification: 2'-O-methoxyethylribose
  modified_base 16: mod_base = OTHER; note = sugar modification: 2'-O-methoxyethylribose
cttgtacttcatccca

SEQ ID NO: 908 - RNA, 16 nt, synthetic construct
  source 1..16: mol_type = other RNA; note = Antisense oligonucleotide
  modified_base 1: mod_base = OTHER; mod_base = m5c; note = backbone modification: 5'-phosphorothioate; note = sugar modification: lna
  modified_base 2: mod_base = OTHER; note = sugar modification: 2'-O-methoxyethylribose; note = backbone modification: 5'-phosphorothioate; note = thymine
  modified_base 3: mod_base = OTHER; note = sugar modification: 2'-O-methoxyethylribose; note = thymine; note = backbone modification: 5'-phosphorothioate
  modified_base 4: mod_base = OTHER; note = backbone modification: 5'-phosphorothioate; note = sugar modification: 2'-O-methoxyethylribose
  modified_base 5: mod_base = OTHER; note = sugar modification: 2'-O-methoxyethylribose; note = thymine; note = backbone modification: 5'-phosphorothioate
  modified_base 6: mod_base = OTHER; note = sugar modification: 2'-O-methoxyethylribose; note = backbone modification: 5'-phosphorothioate
  modified_base 7: mod_base = OTHER; mod_base = m5c; note = sugar modification: 2'-O-methoxyethylribose; note = backbone modification: 5'-phosphorothioate
  modified_base 8: mod_base = OTHER; note = sugar modification: 2'-O-methoxyethylribose; note = backbone modification: 5'-phosphorothioate; note = thymine
  modified_base 9: mod_base = OTHER; note = thymine; note = backbone modification: 5'-phosphorothioate; note = sugar modification: 2'-O-methoxyethylribose
  modified_base 10: mod_base = m5c; mod_base = OTHER; note = sugar modification: 2'-O-methoxyethylribose; note = backbone modification: 5'-phosphorothioate
  modified_base 11: mod_base = OTHER; note = sugar modification: 2'-O-methoxyethylribose; note = backbone modification: 5'-phosphorothioate
  modified_base 12: mod_base = OTHER; note = sugar modification: 2'-O-methoxyethylribose; note = thymine; note = backbone modification: 5'-phosphorothioate
  modified_base 13: mod_base = m5c; mod_base = OTHER; note = sugar modification: 2'-O-methoxyethylribose; note = backbone modification: 5'-phosphorothioate
  modified_base 14: mod_base = OTHER; mod_base = m5c; note = sugar modification: 2'-O-methoxyethylribose; note = backbone modification: 5'-phosphorothioate
  modified_base 15: mod_base = OTHER; mod_base = m5c; note = backbone modification: 5'-phosphorothioate; note = sugar modification: 2'-O-methoxyethylribose
  modified_base 16: mod_base = OTHER; note = sugar modification: lna
cttgtacttcatccca

SEQ ID NO: 909 - RNA, 16 nt, synthetic construct
  source 1..16: mol_type = other RNA; note = Antisense oligonucleotide
  modified_base 1: mod_base = m5c; mod_base = OTHER; note = sugar modification: lna; note = backbone modification: 5'-phosphorothioate
  modified_base 2: mod_base = OTHER; note = sugar modification: lna; note = backbone modification: 5'-phosphorothioate; note = thymine
  modified_base 3: mod_base = OTHER; note = sugar modification: 2'-O-methoxyethylribose; note = thymine; note = backbone modification: 5'-phosphorothioate
  modified_base 4: mod_base = OTHER; note = backbone modification: 5'-phosphorothioate; note = sugar modification: 2'-O-methoxyethylribose
  modified_base 5: mod_base = OTHER; note = backbone modification: 5'-phosphorothioate; note = thymine; note = sugar modification: 2'-O-methoxyethylribose
  modified_base 6: mod_base = OTHER; note = sugar modification: 2'-O-methoxyethylribose; note = backbone modification: 5'-phosphorothioate
  modified_base 7: mod_base = OTHER; mod_base = m5c; note = backbone modification: 5'-phosphorothioate; note = sugar modification: 2'-O-methoxyethylribose
  modified_base 8: mod_base = OTHER; note = thymine; note = sugar modification: 2'-O-methoxyethylribose; note = backbone modification: 5'-phosphorothioate
  modified_base 9: mod_base = OTHER; note = thymine; note = sugar modification: 2'-O-methoxyethylribose; note = backbone modification: 5'-phosphorothioate
  modified_base 10: mod_base = OTHER; mod_base = m5c; note = backbone modification: 5'-phosphorothioate; note = sugar modification: 2'-O-methoxyethylribose
  modified_base 11: mod_base = OTHER; note = sugar modification: 2'-O-methoxyethylribose; note = backbone modification: 5'-phosphorothioate
  modified_base 12: mod_base = OTHER; note = backbone modification: 5'-phosphorothioate; note = sugar modification: 2'-O-methoxyethylribose; note = thymine
  modified_base 13: mod_base = OTHER; mod_base = m5c; note = backbone modification: 5'-phosphorothioate; note = sugar modification: 2'-O-methoxyethylribose
  modified_base 14: mod_base = m5c; mod_base = OTHER; note = sugar modification: 2'-O-methoxyethylribose; note = backbone modification: 5'-phosphorothioate
  modified_base 15: mod_base = m5c; mod_base = OTHER; note = sugar modification: 2'-O-methoxyethylribose; note = backbone modification: 5'-phosphorothioate
  modified_base 16: mod_base = OTHER; note = sugar modification: lna
cttgtacttcatccca

SEQ ID NO: 910 - RNA, 16 nt, synthetic construct
  source 1..16: mol_type = other RNA; note = Antisense oligonucleotide
  modified_base 1: mod_base = OTHER; mod_base = m5c; note = backbone modification: 5'-phosphorothioate; note = sugar modification: lna
  modified_base 2: mod_base = OTHER; note = thymine; note = backbone modification: 5'-phosphorothioate; note = sugar modification: lna
  modified_base 3: mod_base = OTHER; note = sugar modification: lna; note = backbone modification: 5'-phosphorothioate; note = thymine
  modified_base 4: mod_base = OTHER; note = backbone modification: 5'-phosphorothioate; note = sugar modification: 2'-O-methoxyethylribose
  modified_base 5: mod_base = OTHER; note = thymine; note = sugar modification: 2'-O-methoxyethylribose; note = backbone modification: 5'-phosphorothioate
  modified_base 6: mod_base = OTHER; note = backbone modification: 5'-phosphorothioate; note = sugar modification: 2'-O-methoxyethylribose
  modified_base 7: mod_base = m5c; mod_base = OTHER; note = sugar modification: 2'-O-methoxyethylribose; note = backbone modification: 5'-phosphorothioate
  modified_base 8: mod_base = OTHER; note = thymine; note = backbone modification: 5'-phosphorothioate; note = sugar modification: 2'-O-methoxyethylribose
  modified_base 9: mod_base = OTHER; note = thymine; note = backbone modification: 5'-phosphorothioate; note = sugar modification: 2'-O-methoxyethylribose
  modified_base 10: mod_base = OTHER; mod_base = m5c; note = backbone modification: 5'-phosphorothioate; note = sugar modification: 2'-O-methoxyethylribose
  modified_base 11: mod_base = OTHER; note = backbone modification: 5'-phosphorothioate; note = sugar modification: 2'-O-methoxyethylribose
  modified_base 12: mod_base = OTHER; note = backbone modification: 5'-phosphorothioate; note = thymine; note = sugar modification: 2'-O-methoxyethylribose
  modified_base 13: mod_base = m5c; mod_base = OTHER; note = backbone modification: 5'-phosphorothioate; note = sugar modification: 2'-O-methoxyethylribose
  modified_base 14: mod_base = OTHER; mod_base = m5c; note = sugar modification: 2'-O-methoxyethylribose; note = backbone modification: 5'-phosphorothioate
  modified_base 15: mod_base = OTHER; mod_base = m5c; note = sugar modification: 2'-O-methoxyethylribose; note = backbone modification: 5'-phosphorothioate
  modified_base 16: mod_base = OTHER; note = sugar modification: lna
cttgtacttcatccca

SEQ ID NO: 911 - RNA, 16 nt, synthetic construct
  source 1..16: mol_type = other RNA; note = Antisense oligonucleotide
  modified_base 1: mod_base = m5c; mod_base = OTHER; note = backbone modification: 5'-phosphorothioate; note = sugar modification: lna
  modified_base 2: mod_base = OTHER; note = sugar modification: 2'-O-methoxyethylribose; note = backbone modification: 5'-phosphorothioate; note = thymine
  modified_base 3: mod_base = OTHER; note = backbone modification: 5'-phosphorothioate; note = sugar modification: 2'-O-methoxyethylribose; note = thymine
  modified_base 4: mod_base = OTHER; note = backbone modification: 5'-phosphorothioate; note = sugar modification: 2'-O-methoxyethylribose
  modified_base 5: mod_base = OTHER; note = thymine; note = backbone modification: 5'-phosphorothioate; note = sugar modification: 2'-O-methoxyethylribose
  modified_base 6: mod_base = OTHER; note = backbone modification: 5'-phosphorothioate; note = sugar modification: 2'-O-methoxyethylribose
  modified_base 7: mod_base = m5c; mod_base = OTHER; note = backbone modification: 5'-phosphorothioate; note = sugar modification: 2'-O-methoxyethylribose
  modified_base 8: mod_base = OTHER; note = backbone modification: 5'-phosphorothioate; note = thymine; note = sugar modification: 2'-O-methoxyethylribose
  modified_base 9: mod_base = OTHER; note = backbone modification: 5'-phosphorothioate; note = thymine; note = sugar modification: 2'-O-methoxyethylribose
  modified_base 10: mod_base = OTHER; mod_base = m5c; note = sugar modification: 2'-O-methoxyethylribose; note = backbone modification: 5'-phosphorothioate
  modified_base 11: mod_base = OTHER; note = backbone modification: 5'-phosphorothioate; note = sugar modification: 2'-O-methoxyethylribose
  modified_base 12: mod_base = OTHER; note = sugar modification: 2'-O-methoxyethylribose; note = backbone modification: 5'-phosphorothioate; note = thymine
  modified_base 13: mod_base = m5c; mod_base = OTHER; note = backbone modification: 5'-phosphorothioate; note = sugar modification: 2'-O-methoxyethylribose
  modified_base 14: mod_base = OTHER; mod_base = m5c; note = sugar modification: 2'-O-methoxyethylribose; note = backbone modification: 5'-phosphorothioate
  modified_base 15: mod_base = OTHER; mod_base = m5c; note = backbone modification: 5'-phosphorothioate; note = sugar modification: lna
  modified_base 16: mod_base = OTHER; note = sugar modification: lna
cttgtacttcatccca

SEQ ID NO: 912 - RNA, 16 nt, synthetic construct
  source 1..16: mol_type = other RNA; note = Antisense oligonucleotide
  modified_base 1: mod_base = m5c; mod_base = OTHER; note = sugar modification: lna; note = backbone modification: 5'-phosphorothioate
  modified_base 2: mod_base = OTHER; note = thymine; note = sugar modification: lna; note = backbone modification: 5'-phosphorothioate
  modified_base 3: mod_base = OTHER; note = backbone modification: 5'-phosphorothioate; note = thymine; note = sugar modification: 2'-O-methoxyethylribose
  modified_base 4: mod_base = OTHER; note = backbone modification: 5'-phosphorothioate; note = sugar modification: 2'-O-methoxyethylribose
  modified_base 5: mod_base = OTHER; note = thymine; note = sugar modification: 2'-O-methoxyethylribose; note = backbone modification: 5'-phosphorothioate
  modified_base 6: mod_base = OTHER; note = backbone modification: 5'-phosphorothioate; note = sugar modification: 2'-O-methoxyethylribose
  modified_base 7: mod_base = OTHER; mod_base = m5c; note = sugar modification: 2'-O-methoxyethylribose; note = backbone modification: 5'-phosphorothioate
  modified_base 8: mod_base = OTHER; note = thymine; note = backbone modification: 5'-phosphorothioate; note = sugar modification: 2'-O-methoxyethylribose
  modified_base 9: mod_base = OTHER; note = backbone modification: 5'-phosphorothioate; note = sugar modification: 2'-O-methoxyethylribose; note = thymine
  modified_base 10: mod_base = OTHER; mod_base = m5c; note = backbone modification: 5'-phosphorothioate; note = sugar modification: 2'-O-methoxyethylribose
  modified_base 11: mod_base = OTHER; note = sugar modification: 2'-O-methoxyethylribose; note = backbone modification: 5'-phosphorothioate
  modified_base 12: mod_base = OTHER; note = thymine; note = sugar modification: 2'-O-methoxyethylribose; note = backbone modification: 5'-phosphorothioate
  modified_base 13: mod_base = m5c; mod_base = OTHER; note = backbone modification: 5'-phosphorothioate; note = sugar modification: 2'-O-methoxyethylribose
  modified_base 14: mod_base = m5c; mod_base = OTHER; note = backbone modification: 5'-phosphorothioate; note = sugar modification: 2'-O-methoxyethylribose
  modified_base 15: mod_base = OTHER; mod_base = m5c; note = backbone modification: 5'-phosphorothioate; note = sugar modification: lna
  modified_base 16: mod_base = OTHER; note = sugar modification: lna
cttgtacttcatccca

SEQ ID NO: 913 - RNA, 16 nt, synthetic construct
  source 1..16: mol_type = other RNA; note = Antisense oligonucleotide
  modified_base 1: mod_base = m5c; mod_base = OTHER; note = sugar modification: lna; note = backbone modification: 5'-phosphorothioate
  modified_base 2: mod_base = OTHER; note = sugar modification: lna; note = backbone modification: 5'-phosphorothioate; note = thymine
  modified_base 3: mod_base = OTHER; note = thymine; note = backbone modification: 5'-phosphorothioate; note = sugar modification: lna
  modified_base 4: mod_base = OTHER; note = backbone modification: 5'-phosphorothioate; note = sugar modification: 2'-O-methoxyethylribose
  modified_base 5: mod_base = OTHER; note = sugar modification: 2'-O-methoxyethylribose; note = thymine; note = backbone modification: 5'-phosphorothioate
  modified_base 6: mod_base = OTHER; note = backbone modification: 5'-phosphorothioate; note = sugar modification: 2'-O-methoxyethylribose
  modified_base 7: mod_base = m5c; mod_base = OTHER; note = backbone modification: 5'-phosphorothioate; note = sugar modification: 2'-O-methoxyethylribose
  modified_base 8: mod_base = OTHER; note = backbone modification: 5'-phosphorothioate; note = sugar modification: 2'-O-methoxyethylribose; note = thymine
  modified_base 9: mod_base = OTHER; note = backbone modification: 5'-phosphorothioate; note = thymine; note = sugar modification: 2'-O-methoxyethylribose
  modified_base 10: mod_base = OTHER; mod_base = m5c; note = sugar modification: 2'-O-methoxyethylribose; note = backbone modification: 5'-phosphorothioate
  modified_base 11: mod_base = OTHER; note = sugar modification: 2'-O-methoxyethylribose; note = backbone modification: 5'-phosphorothioate
  modified_base 12: mod_base = OTHER; note = thymine; note = backbone modification: 5'-phosphorothioate; note = sugar modification: 2'-O-methoxyethylribose
  modified_base 13: mod_base = OTHER; mod_base = m5c; note = sugar modification: 2'-O-methoxyethylribose; note = backbone modification: 5'-phosphorothioate
  modified_base 14: mod_base = m5c; mod_base = OTHER; note = sugar modification: 2'-O-methoxyethylribose; note = backbone modification: 5'-phosphorothioate
  modified_base 15: mod_base = OTHER; mod_base = m5c; note = backbone modification: 5'-phosphorothioate; note = sugar modification: lna
  modified_base 16: mod_base = OTHER; note = sugar modification: lna
cttgtacttcatccca

SEQ ID NO: 914 - RNA, 16 nt, synthetic construct
  source 1..16: mol_type = other RNA; note = Antisense oligonucleotide
  modified_base 1: mod_base = m5c; mod_base = OTHER; note = backbone modification: 5'-phosphorothioate; note = sugar modification: lna
  modified_base 2: mod_base = OTHER; note = thymine; note = backbone modification: 5'-phosphorothioate; note = sugar modification: lna
  modified_base 3: mod_base = OTHER; note = backbone modification: 5'-phosphorothioate; note = sugar modification: lna; note = thymine
  modified_base 4: mod_base = OTHER; note = sugar modification: lna; note = backbone modification: 5'-phosphorothioate
  modified_base 5: mod_base = OTHER; note = sugar modification: 2'-O-methoxyethylribose; note = backbone modification: 5'-phosphorothioate; note = thymine
  modified_base 6: mod_base = OTHER; note = sugar modification: 2'-O-methoxyethylribose; note = backbone modification: 5'-phosphorothioate
  modified_base 7: mod_base = m5c; mod_base = OTHER; note = sugar modification: 2'-O-methoxyethylribose; note = backbone modification: 5'-phosphorothioate
  modified_base 8: mod_base = OTHER; note = thymine; note = backbone modification: 5'-phosphorothioate; note = sugar modification: 2'-O-methoxyethylribose
  modified_base 9: mod_base = OTHER; note = sugar modification: 2'-O-methoxyethylribose; note = thymine; note = backbone modification: 5'-phosphorothioate
  modified_base 10: mod_base = m5c; mod_base = OTHER; note = backbone modification: 5'-phosphorothioate; note = sugar modification: 2'-O-methoxyethylribose
  modified_base 11: mod_base = OTHER; note = backbone modification: 5'-phosphorothioate; note = sugar modification: 2'-O-methoxyethylribose
  modified_base 12: mod_base = OTHER; note = backbone modification: 5'-phosphorothioate; note = thymine; note = sugar modification: 2'-O-methoxyethylribose
  modified_base 13: mod_base = OTHER; mod_base = m5c; note = sugar modification: 2'-O-methoxyethylribose; note = backbone modification: 5'-phosphorothioate
  modified_base 14: mod_base = m5c; mod_base = OTHER; note = backbone modification: 5'-phosphorothioate; note = sugar modification: 2'-O-methoxyethylribose
  modified_base 15: mod_base = OTHER; mod_base = m5c; note = backbone modification: 5'-phosphorothioate; note = sugar modification: lna
  modified_base 16: mod_base = OTHER; note = sugar modification: lna
cttgtacttcatccca

SEQ ID NO: 915 - RNA, 16 nt, synthetic construct
  source 1..16: mol_type = other RNA; note = Antisense oligonucleotide
  modified_base 1: mod_base = m5c; mod_base = OTHER; note = backbone modification: 5'-phosphorothioate; note = sugar modification: lna
  modified_base 2: mod_base = OTHER; note = thymine; note = sugar modification: 2'-O-methoxyethylribose; note = backbone modification: 5'-phosphorothioate
  modified_base 3: mod_base = OTHER; note = backbone modification: 5'-phosphorothioate; note = thymine; note = sugar modification: 2'-O-methoxyethylribose
  modified_base 4: mod_base = OTHER; note = sugar modification: 2'-O-methoxyethylribose; note = backbone modification: 5'-phosphorothioate
  modified_base 5: mod_base = OTHER; note = thymine; note = backbone modification: 5'-phosphorothioate; note = sugar modification: 2'-O-methoxyethylribose
  modified_base 6: mod_base = OTHER; note = sugar modification: 2'-O-methoxyethylribose; note = backbone modification: 5'-phosphorothioate
  modified_base 7: mod_base = OTHER; mod_base = m5c; note = backbone modification: 5'-phosphorothioate; note = sugar modification: 2'-O-methoxyethylribose
  modified_base 8: mod_base = OTHER; note = thymine; note = sugar modification: 2'-O-methoxyethylribose; note = backbone modification: 5'-phosphorothioate
  modified_base 9: mod_base = OTHER; note = backbone modification: 5'-phosphorothioate; note = sugar modification: 2'-O-methoxyethylribose; note = thymine
  modified_base 10: mod_base = OTHER; mod_base = m5c; note = backbone modification: 5'-phosphorothioate; note = sugar modification: 2'-O-methoxyethylribose
  modified_base 11: mod_base = OTHER; note = backbone modification: 5'-phosphorothioate; note = sugar modification: 2'-O-methoxyethylribose
  modified_base 12: mod_base = OTHER; note = backbone modification: 5'-phosphorothioate; note = sugar modification: 2'-O-methoxyethylribose; note = thymine
  modified_base 13: mod_base = OTHER; mod_base = m5c; note = backbone modification: 5'-phosphorothioate; note = sugar modification: 2'-O-methoxyethylribose
  modified_base 14: mod_base = OTHER; mod_base = m5c; note = backbone modification: 5'-phosphorothioate; note = sugar modification: lna
  modified_base 15: mod_base = OTHER; mod_base = m5c; note = sugar modification: lna; note = backbone modification: 5'-phosphorothioate
  modified_base 16: mod_base = OTHER; note = sugar modification: lna
cttgtacttcatccca

SEQ ID NO: 916 - RNA, 16 nt, synthetic construct
  source 1..16: mol_type = other RNA; note = Antisense oligonucleotide
  modified_base 1: mod_base = OTHER; mod_base = m5c; note = backbone modification: 5'-phosphorothioate; note = sugar modification: lna
  modified_base 2: mod_base = OTHER; note = sugar modification: lna; note = backbone modification: 5'-phosphorothioate; note = thymine
  modified_base 3: mod_base = OTHER; note = thymine; note = backbone modification: 5'-phosphorothioate; note = sugar modification: 2'-O-methoxyethylribose
  modified_base 4: mod_base = OTHER; note = backbone modification: 5'-phosphorothioate; note = sugar modification: 2'-O-methoxyethylribose
  modified_base 5: mod_base = OTHER; note = sugar modification: 2'-O-methoxyethylribose; note = thymine; note = backbone modification: 5'-phosphorothioate
  modified_base 6: mod_base = OTHER; note = backbone modification: 5'-phosphorothioate; note = sugar modification: 2'-O-methoxyethylribose
  modified_base 7: mod_base = m5c; mod_base = OTHER; note = sugar modification: 2'-O-methoxyethylribose; note = backbone modification: 5'-phosphorothioate
  modified_base 8: mod_base = OTHER; note = sugar modification: 2'-O-methoxyethylribose; note = backbone modification: 5'-phosphorothioate; note = thymine
  modified_base 9: mod_base = OTHER; note = backbone modification: 5'-phosphorothioate; note = thymine; note = sugar modification: 2'-O-methoxyethylribose
  modified_base 10: mod_base = m5c; mod_base = OTHER; note = sugar modification: 2'-O-methoxyethylribose; note = backbone modification: 5'-phosphorothioate
  modified_base 11: mod_base = OTHER; note = backbone modification: 5'-phosphorothioate; note = sugar modification: 2'-O-methoxyethylribose
  modified_base 12: mod_base = OTHER; note = backbone modification: 5'-phosphorothioate; note = sugar modification: 2'-O-methoxyethylribose; note = thymine
  modified_base 13: mod_base = OTHER; mod_base = m5c; note = backbone modification: 5'-phosphorothioate; note = sugar modification: 2'-O-methoxyethylribose
  modified_base 14: mod_base = OTHER; mod_base = m5c; note = sugar modification: lna; note = backbone modification: 5'-phosphorothioate
  modified_base 15: mod_base = OTHER; mod_base = m5c; note = sugar modification: lna; note = backbone modification: 5'-phosphorothioate
  modified_base 16: mod_base = OTHER; note = sugar modification: lna
cttgtacttcatccca

SEQ ID NO: 917 - RNA, 16 nt, synthetic construct
  source 1..16: mol_type = other RNA; note = Antisense oligonucleotide
  modified_base 1: mod_base = OTHER; mod_base = m5c; note = backbone modification: 5'-phosphorothioate; note = sugar modification: lna
  modified_base 2: mod_base = OTHER; note = sugar modification: lna; note = backbone modification: 5'-phosphorothioate; note = thymine
  modified_base 3: mod_base = OTHER; note = sugar modification: lna; note = thymine; note = backbone modification: 5'-phosphorothioate
  modified_base 4: mod_base = OTHER; note = backbone modification: 5'-phosphorothioate; note = sugar modification: lna
  modified_base 5: mod_base = OTHER; note = sugar modification: 2'-O-methoxyethylribose; note = thymine; note = backbone modification: 5'-phosphorothioate
  modified_base 6: mod_base = OTHER; note = backbone modification: 5'-phosphorothioate; note = sugar modification: 2'-O-methoxyethylribose
  modified_base 7: mod_base = m5c; mod_base = OTHER; note = backbone modification: 5'-phosphorothioate; note = sugar modification: 2'-O-methoxyethylribose
  modified_base 8: mod_base = OTHER; note = sugar modification: 2'-O-methoxyethylribose; note = thymine; note = backbone modification: 5'-phosphorothioate
  modified_base 9: mod_base = OTHER; note = backbone modification: 5'-phosphorothioate; note = thymine; note = sugar modification: 2'-O-methoxyethylribose
  modified_base 10: mod_base = OTHER; mod_base = m5c; note = sugar modification: 2'-O-methoxyethylribose; note = backbone modification: 5'-phosphorothioate
  modified_base 11: mod_base = OTHER; note = sugar modification: 2'-O-methoxyethylribose; note = backbone modification: 5'-phosphorothioate
  modified_base 12: mod_base = OTHER; note = backbone modification: 5'-phosphorothioate; note = sugar modification: 2'-O-methoxyethylribose; note = thymine
  modified_base 13: mod_base = m5c; mod_base = OTHER; note = sugar modification: 2'-O-methoxyethylribose; note = backbone modification: 5'-phosphorothioate
  modified_base 14: mod_base = m5c; mod_base = OTHER; note = sugar modification: lna; note = backbone modification: 5'-phosphorothioate
  modified_base 15: mod_base = OTHER; mod_base = m5c; note = sugar modification: lna; note = backbone modification: 5'-phosphorothioate
  modified_base 16: mod_base = OTHER; note = sugar modification: lna
cttgtacttcatccca

SEQ ID NO: 918 - RNA, 16 nt, synthetic construct
  source 1..16: mol_type = other RNA; note = Antisense oligonucleotide
  modified_base 1: mod_base = OTHER; mod_base = m5c; note = backbone modification: 5'-phosphorothioate; note = sugar modification: lna
  modified_base 2: mod_base = OTHER; note = sugar modification: lna; note = thymine; note = backbone modification: 5'-phosphorothioate
  modified_base 3: mod_base = OTHER; note = backbone modification: 5'-phosphorothioate; note = thymine; note = sugar modification: 2'-O-methoxyethylribose
  modified_base 4: mod_base = OTHER; note = backbone modification: 5'-phosphorothioate; note = sugar modification: 2'-O-methoxyethylribose
  modified_base 5: mod_base = OTHER; note = backbone modification: 5'-phosphorothioate; note = sugar modification: 2'-O-methoxyethylribose; note = thymine
  modified_base 6: mod_base = OTHER; note = sugar modification: 2'-O-methoxyethylribose; note = backbone modification: 5'-phosphorothioate
  modified_base 7: mod_base = m5c; mod_base = OTHER; note = backbone modification: 5'-phosphorothioate; note = sugar modification: 2'-O-methoxyethylribose
  modified_base 8: mod_base = OTHER; note = sugar modification: 2'-O-methoxyethylribose; note = thymine; note = backbone modification: 5'-phosphorothioate
  modified_base 9: mod_base = OTHER; note = thymine; note = sugar modification: 2'-O-methoxyethylribose; note = backbone modification: 5'-phosphorothioate
  modified_base 10: mod_base = OTHER; mod_base = m5c; note = sugar modification: 2'-O-methoxyethylribose; note = backbone modification: 5'-phosphorothioate
  modified_base 11: mod_base = OTHER; note = sugar modification: 2'-O-methoxyethylribose; note = backbone modification: 5'-phosphorothioate
  modified_base 12: mod_base = OTHER; note = backbone modification: 5'-phosphorothioate; note = sugar modification: 2'-O-methoxyethylribose; note = thymine
  modified_base 13: mod_base = OTHER; mod_base = m5c; note = backbone modification: 5'-phosphorothioate; note = sugar modification: lna
  modified_base 14: mod_base = m5c; mod_base = OTHER; note = sugar modification: lna; note = backbone modification: 5'-phosphorothioate
  modified_base 15: mod_base = OTHER; mod_base = m5c; note = sugar modification: lna; note = backbone modification: 5'-phosphorothioate
  modified_base 16: mod_base = OTHER; note = sugar modification: lna
cttgtacttcatccca

SEQ ID NO: 919 - RNA, 16 nt, synthetic construct
  source 1..16: mol_type = other RNA; note = Antisense oligonucleotide
  modified_base 1: mod_base = m5c; mod_base = OTHER; note = sugar modification: lna; note = backbone modification: 5'-phosphorothioate
  modified_base 2: mod_base = OTHER; note = thymine; note = backbone modification: 5'-phosphorothioate; note = sugar modification: lna
  modified_base 3: mod_base = OTHER; note = thymine; note = sugar modification: lna; note = backbone modification: 5'-phosphorothioate
  modified_base 4: mod_base = OTHER; note = sugar modification: 2'-O-methoxyethylribose; note = backbone modification: 5'-phosphorothioate
  modified_base 5: mod_base = OTHER; note = backbone modification: 5'-phosphorothioate; note = sugar modification: 2'-O-methoxyethylribose; note = thymine
  modified_base 6: mod_base = OTHER; note = backbone modification: 5'-phosphorothioate; note = sugar modification: 2'-O-methoxyethylribose
  modified_base 7: mod_base = m5c; mod_base = OTHER; note = backbone modification: 5'-phosphorothioate; note = sugar modification: 2'-O-methoxyethylribose
  modified_base 8: mod_base = OTHER; note = thymine; note = sugar modification: 2'-O-methoxyethylribose; note = backbone modification: 5'-phosphorothioate
  modified_base 9: mod_base = OTHER; note = sugar modification: 2'-O-methoxyethylribose; note = thymine; note = backbone modification: 5'-phosphorothioate
  modified_base 10: mod_base = OTHER; mod_base = m5c; note = sugar modification: 2'-O-methoxyethylribose; note = backbone modification: 5'-phosphorothioate
  modified_base 11: mod_base = OTHER; note = backbone modification: 5'-phosphorothioate; note = sugar modification: 2'-O-methoxyethylribose
  modified_base 12: mod_base = OTHER; note = sugar modification: 2'-O-methoxyethylribose; note = backbone modification: 5'-phosphorothioate; note = thymine
  modified_base 13: mod_base = OTHER; mod_base = m5c; note = sugar modification: lna; note = backbone modification: 5'-phosphorothioate
  modified_base 14: mod_base = m5c; mod_base = OTHER; note = sugar modification: lna; note = backbone modification: 5'-phosphorothioate
  modified_base 15: mod_base = m5c; mod_base = OTHER; note = sugar modification: lna; note = backbone modification: 5'-phosphorothioate
  modified_base 16: mod_base = OTHER; note = sugar modification: lna
cttgtacttcatccca

SEQ ID NO: 920 - RNA, 16 nt, synthetic construct
  source 1..16: mol_type = other RNA; note = Antisense oligonucleotide
  modified_base 1: mod_base = m5c; mod_base = OTHER; note = sugar modification: lna; note = backbone modification: 5'-phosphorothioate
  modified_base 2: mod_base = OTHER; note = sugar modification: lna; note = thymine; note = backbone modification: 5'-phosphorothioate
  modified_base 3: mod_base = OTHER; note = thymine; note = backbone modification: 5'-phosphorothioate; note = sugar modification: lna
  modified_base 4: mod_base = OTHER; note = sugar modification: lna; note = backbone modification: 5'-phosphorothioate
  modified_base 5: mod_base = OTHER; note = backbone modification: 5'-phosphorothioate; note = thymine; note = sugar modification: 2'-O-methoxyethylribose
  modified_base 6: mod_base = OTHER; note = sugar modification: 2'-O-methoxyethylribose; note = backbone modification: 5'-phosphorothioate
  modified_base 7: mod_base = m5c; mod_base = OTHER; note = sugar modification: 2'-O-methoxyethylribose; note = backbone modification: 5'-phosphorothioate
  modified_base 8: mod_base = OTHER; note = sugar modification: 2'-O-methoxyethylribose; note = thymine; note = backbone modification: 5'-phosphorothioate
  modified_base 9: mod_base = OTHER; note = backbone modification: 5'-phosphorothioate; note = sugar modification: 2'-O-methoxyethylribose; note = thymine
  modified_base 10: mod_base = m5c; mod_base = OTHER; note = sugar modification: 2'-O-methoxyethylribose; note = backbone modification: 5'-phosphorothioate
  modified_base 11: mod_base = OTHER; note = backbone modification: 5'-phosphorothioate; note = sugar modification: 2'-O-methoxyethylribose
  modified_base 12: mod_base = OTHER; note = backbone modification: 5'-phosphorothioate; note = thymine; note = sugar modification: 2'-O-methoxyethylribose
  modified_base 13: mod_base = m5c; mod_base = OTHER; note = backbone modification: 5'-phosphorothioate; note = sugar modification: lna
  modified_base 14: mod_base = m5c; mod_base = OTHER; note = backbone modification: 5'-phosphorothioate; note = sugar modification: lna
  modified_base 15: mod_base = m5c; mod_base = OTHER; note = backbone modification: 5'-phosphorothioate; note = sugar modification: lna
  modified_base 16: mod_base = OTHER; note = sugar modification: lna
cttgtacttcatccca

SEQ ID NO: 921 - RNA, 16 nt, synthetic construct
  source 1..16: mol_type = other RNA; note = Antisense oligonucleotide
  modified_base 1: mod_base = OTHER; mod_base = m5c; note = backbone modification: 5'-phosphorothioate; note = sugar modification: lna
  modified_base 2: mod_base = OTHER; note = backbone modification: 5'-phosphorothioate; note = thymine; note = sugar modification: lna
  modified_base 3: mod_base = OTHER; note = backbone modification: 5'-phosphorothioate; note = sugar modification: lna; note = thymine
  modified_base 4: mod_base = OTHER; note = sugar modification: lna; note = backbone modification: 5'-phosphorothioate
  modified_base 5: mod_base = OTHER; note = backbone modification: 5'-phosphorothioate; note = thymine; note = sugar modification: lna
  modified_base 6: mod_base = OTHER; note = sugar modification: 2'-O-methoxyethylribose; note = backbone modification: 5'-phosphorothioate
  modified_base 7: mod_base = m5c; mod_base = OTHER; note = backbone modification: 5'-phosphorothioate; note = sugar modification: 2'-O-methoxyethylribose
  modified_base 8: mod_base = OTHER; note = sugar modification: 2'-O-methoxyethylribose; note = backbone modification: 5'-phosphorothioate; note = thymine
  modified_base 9: mod_base = OTHER; note = sugar modification: 2'-O-methoxyethylribose; note = backbone modification: 5'-phosphorothioate; note = thymine
  modified_base 10: mod_base = OTHER; mod_base = m5c; note = sugar modification: 2'-O-methoxyethylribose; note = backbone modification: 5'-phosphorothioate
  modified_base 11: mod_base = OTHER; note = sugar modification: 2'-O-methoxyethylribose; note = backbone modification: 5'-phosphorothioate
  modified_base 12: mod_base = OTHER; note = sugar modification: lna; note = backbone modification: 5'-phosphorothioate; note = thymine
  modified_base 13: mod_base = m5c; mod_base = OTHER; note = backbone modification: 5'-phosphorothioate; note = sugar modification: lna
  modified_base 14: mod_base = OTHER; mod_base = m5c; note = backbone modification: 5'-phosphorothioate; note = sugar modification: lna
  modified_base 15: mod_base = m5c; mod_base = OTHER; note = backbone modification: 5'-phosphorothioate; note = sugar modification: lna
  modified_base 16: mod_base = OTHER; note = sugar modification: lna
cttgtacttcatccca

SEQ ID NO: 922 - RNA, 16 nt, synthetic construct
  source 1..16: mol_type = other RNA; note = Antisense oligonucleotide
  modified_base 1: mod_base = m5c; mod_base = OTHER; note = sugar modification: 2'-O-methoxyethylribose; note = backbone modification: 5'-phosphorothioate
  modified_base 2: mod_base = OTHER; note = backbone modification: 5'-phosphorothioate; note = thymine; note = sugar modification: 2'-O-methoxyethylribose
  modified_base 3: mod_base = OTHER; note = backbone modification: 5'-phosphorothioate; note = sugar modification: 2'-O-methoxyethylribose; note = thymine
  modified_base 4: mod_base = OTHER; note = sugar modification: 2'-O-methoxyethylribose; note = backbone modification: 5'-phosphorothioate
  modified_base 5: mod_base = OTHER; note = backbone modification: 5'-phosphorothioate; note = thymine; note = sugar modification: 2'-O-methoxyethylribose
  modified_base 6: mod_base = OTHER; note = backbone modification: 5'-phosphorothioate; note = sugar modification: 2'-O-methoxyethylribose
  modified_base 7: mod_base = m5c; mod_base = OTHER; note = sugar modification: 2'-O-methoxyethylribose; note = backbone modification: 5'-phosphorothioate
  modified_base 8: mod_base = OTHER; note = thymine; note = backbone modification: 5'-phosphorothioate; note = sugar modification: 2'-O-methoxyethylribose
  modified_base 9: mod_base = OTHER; note = sugar modification: 2'-O-methoxyethylribose; note = thymine; note = backbone modification: 5'-phosphorothioate
  modified_base 10: mod_base = m5c; mod_base = OTHER; note = backbone modification: 5'-phosphorothioate; note = sugar modification: 2'-O-methoxyethylribose
  modified_base 11: mod_base = OTHER; note = sugar modification: 2'-O-methoxyethylribose; note = backbone modification: 5'-phosphorothioate
  modified_base 12: mod_base = OTHER; note = backbone modification: 5'-phosphorothioate; note = thymine; note = sugar modification: 2'-O-methoxyethylribose
  modified_base 13: mod_base = OTHER; mod_base = m5c; note = sugar modification: 2'-O-methoxyethylribose; note = backbone modification: 5'-phosphorothioate
  modified_base 14: mod_base = m5c; mod_base = OTHER; note = backbone modification: 5'-phosphorothioate; note = sugar modification: 2'-O-methoxyethylribose
  modified_base 15: mod_base = OTHER; mod_base = m5c; note = sugar modification: 2'-O-methoxyethylribose; note = backbone modification: 5'-phosphorothioate
  modified_base 16: mod_base = OTHER; note = sugar modification: lna
cttgtacttcatccca

SEQ ID NO: 923 - RNA, 16 nt, synthetic construct
  source 1..16: mol_type = other RNA; note = Antisense oligonucleotide
  modified_base 1: mod_base = m5c; mod_base = OTHER; note = sugar modification: 2'-O-methoxyethylribose; note = backbone modification: 5'-phosphorothioate
  modified_base 2: mod_base = OTHER; note = thymine; note = backbone modification: 5'-phosphorothioate; note = sugar modification: 2'-O-methoxyethylribose
  modified_base 3: mod_base = OTHER; note = sugar modification: 2'-O-methoxyethylribose; note = backbone modification: 5'-phosphorothioate; note = thymine
  modified_base 4: mod_base = OTHER; note = sugar modification: 2'-O-methoxyethylribose; note = backbone modification: 5'-phosphorothioate
  modified_base 5: mod_base = OTHER; note = thymine; note = backbone modification: 5'-phosphorothioate; note = sugar modification: 2'-O-methoxyethylribose
  modified_base 6: mod_base = OTHER; note = sugar modification: 2'-O-methoxyethylribose; note = backbone modification: 5'-phosphorothioate
  modified_base 7: mod_base = m5c; mod_base = OTHER; note = backbone modification: 5'-phosphorothioate; note = sugar modification: 2'-O-methoxyethylribose
  modified_base 8: mod_base = OTHER; note = sugar modification: 2'-O-methoxyethylribose; note = backbone modification: 5'-phosphorothioate; note = thymine
  modified_base 9: mod_base = OTHER; note = thymine; note = backbone modification: 5'-phosphorothioate; note = sugar modification: 2'-O-methoxyethylribose
  modified_base 10: mod_base = OTHER; mod_base = m5c; note = backbone modification: 5'-phosphorothioate; note = sugar modification: 2'-O-methoxyethylribose
  modified_base 11: mod_base = OTHER; note = sugar modification: 2'-O-methoxyethylribose; note = backbone modification: 5'-phosphorothioate
  modified_base 12: mod_base = OTHER; note = backbone modification: 5'-phosphorothioate; note = thymine; note = sugar modification: 2'-O-methoxyethylribose
  modified_base 13: mod_base = m5c; mod_base = OTHER; note = sugar modification: 2'-O-methoxyethylribose; note = backbone modification: 5'-phosphorothioate
  modified_base 14: mod_base = m5c; mod_base = OTHER; note = backbone modification: 5'-phosphorothioate; note = sugar modification: 2'-O-methoxyethylribose
  modified_base 15: mod_base = OTHER; mod_base = m5c; note = backbone modification: 5'-phosphorothioate; note = sugar modification: lna
  modified_base 16: mod_base = OTHER; note = sugar modification: lna
cttgtacttcatccca

SEQ ID NO: 924 - RNA, 16 nt, synthetic construct
  source 1..16: mol_type = other RNA; note = Antisense oligonucleotide
  modified_base 1: mod_base = m5c; mod_base = OTHER; note = backbone modification: 5'-phosphorothioate; note = sugar modification: 2'-O-methoxyethylribose
  modified_base 2: mod_base = OTHER; note = sugar modification: 2'-O-methoxyethylribose; note = thymine; note = backbone modification: 5'-phosphorothioate
  modified_base 3: mod_base = OTHER; note = sugar modification: 2'-O-methoxyethylribose; note = thymine; note = backbone modification: 5'-phosphorothioate
  modified_base 4: mod_base = OTHER; note = backbone modification: 5'-phosphorothioate; note = sugar modification: 2'-O-methoxyethylribose
  modified_base 5: mod_base = OTHER; note = sugar modification: 2'-O-methoxyethylribose; note = thymine; note = backbone modification: 5'-phosphorothioate
  modified_base 6: mod_base = OTHER; note = sugar modification: 2'-O-methoxyethylribose; note = backbone modification: 5'-phosphorothioate
  modified_base 7: mod_base = OTHER; mod_base = m5c; note = backbone modification: 5'-phosphorothioate; note = sugar modification: 2'-O-methoxyethylribose
  modified_base 8: mod_base = OTHER; note = thymine; note = backbone modification: 5'-phosphorothioate; note = sugar modification: 2'-O-methoxyethylribose
  modified_base 9: mod_base = OTHER; note = backbone modification: 5'-phosphorothioate; note = sugar modification: 2'-O-methoxyethylribose; note = thymine
  modified_base 10: mod_base = m5c; mod_base = OTHER; note = sugar modification: 2'-O-methoxyethylribose; note = backbone modification: 5'-phosphorothioate
  modified_base 11: mod_base = OTHER; note = backbone modification: 5'-phosphorothioate; note = sugar modification: 2'-O-methoxyethylribose
  modified_base 12: mod_base = OTHER; note = thymine; note = backbone modification: 5'-phosphorothioate; note = sugar modification: 2'-O-methoxyethylribose
  modified_base 13: mod_base = m5c; mod_base = OTHER; note = sugar modification: 2'-O-methoxyethylribose; note = backbone modification: 5'-phosphorothioate
  modified_base 14: mod_base = m5c; mod_base = OTHER; note = sugar modification: lna; note = backbone modification: 5'-phosphorothioate
  modified_base 15: mod_base = m5c; mod_base = OTHER; note = backbone modification: 5'-phosphorothioate; note = sugar modification: lna
  modified_base 16: mod_base = OTHER; note = sugar modification: lna
cttgtacttcatccca

SEQ ID NO: 925 - RNA, 15 nt, synthetic construct
  source 1..15: mol_type = other RNA; note = Antisense oligonucleotide
  modified_base 1: mod_base = OTHER; note = backbone modification: 5'-phosphorothioate; note = thymine; note = sugar modification: lna
  modified_base 2: mod_base = OTHER; note = sugar modification: 2'-O-methoxyethylribose; note = backbone modification: 5'-phosphorothioate
  modified_base 3: mod_base = OTHER; note = backbone modification: 5'-phosphorothioate; note = thymine; note = sugar modification: 2'-O-methoxyethylribose
  modified_base 4: mod_base = OTHER; note = thymine; note = sugar modification: 2'-O-methoxyethylribose; note = backbone modification: 5'-phosphorothioate
  modified_base 5: mod_base = OTHER; mod_base = m5c; note = backbone modification: 5'-phosphorothioate; note = sugar modification: 2'-O-methoxyethylribose
  modified_base 6: mod_base = OTHER; note = sugar modification: 2'-O-methoxyethylribose; note = backbone modification: 5'-phosphorothioate; note = thymine
  modified_base 7: mod_base = OTHER; note = sugar modification: 2'-O-methoxyethylribose; note = thymine; note = backbone modification: 5'-phosphorothioate
  modified_base 8: mod_base = OTHER; note = sugar modification: 2'-O-methoxyethylribose; note = backbone modification: 5'-phosphorothioate
  modified_base 9: mod_base = OTHER; note = backbone modification: 5'-phosphorothioate; note = sugar modification: 2'-O-methoxyethylribose; note = thymine
  modified_base 10: mod_base = OTHER; note = sugar modification: 2'-O-methoxyethylribose; note = backbone modification: 5'-phosphorothioate
  modified_base 11: mod_base = m5c; mod_base = OTHER; note = backbone modification: 5'-phosphorothioate; note = sugar modification: 2'-O-methoxyethylribose
  modified_base 12: mod_base = OTHER; note = backbone modification: 5'-phosphorothioate; note = thymine; note = sugar modification: 2'-O-methoxyethylribose
  modified_base 13: mod_base = OTHER; note = thymine; note = sugar modification: 2'-O-methoxyethylribose; note = backbone modification: 5'-phosphorothioate
  modified_base 14: mod_base = OTHER; mod_base = m5c; note = sugar modification: 2'-O-methoxyethylribose; note = backbone modification: 5'-phosphorothioate
  modified_base 15: mod_base = OTHER; note = sugar modification: 2'-O-methoxyethylribose
tgttcttgtacttca

SEQ ID NO: 926 - RNA, 15 nt, synthetic construct
  source 1..15: mol_type = other RNA; note = Antisense oligonucleotide
  modified_base 1: mod_base = OTHER; note = thymine; note = backbone modification: 5'-phosphorothioate; note = sugar modification: lna
  modified_base 2: mod_base = OTHER; note = sugar modification: lna; note = backbone modification: 5'-phosphorothioate
  modified_base 3: mod_base = OTHER; note = sugar modification: 2'-O-methoxyethylribose; note = backbone modification: 5'-phosphorothioate; note = thymine
  modified_base 4: mod_base = OTHER; note = sugar modification: 2'-O-methoxyethylribose; note = backbone modification: 5'-phosphorothioate; note = thymine
  modified_base 5: mod_base = m5c; mod_base = OTHER; note = backbone modification: 5'-phosphorothioate; note = sugar modification: 2'-O-methoxyethylribose
  modified_base 6: mod_base = OTHER; note = thymine; note = backbone modification: 5'-phosphorothioate; note = sugar modification: 2'-O-methoxyethylribose
  modified_base 7: mod_base = OTHER; note = backbone modification: 5'-phosphorothioate; note = thymine; note = sugar modification: 2'-O-methoxyethylribose
  modified_base 8: mod_base = OTHER; note = sugar modification: 2'-O-methoxyethylribose; note = backbone modification: 5'-phosphorothioate
  modified_base 9: mod_base = OTHER; note = backbone modification: 5'-phosphorothioate; note = sugar modification: 2'-O-methoxyethylribose; note = thymine
  modified_base 10: mod_base = OTHER; note = sugar modification: 2'-O-methoxyethylribose; note = backbone modification: 5'-phosphorothioate
  modified_base 11: mod_base = m5c; mod_base = OTHER; note = sugar modification: 2'-O-methoxyethylribose; note = backbone modification: 5'-phosphorothioate
  modified_base 12: mod_base = OTHER; note = backbone modification: 5'-phosphorothioate; note = sugar modification: 2'-O-methoxyethylribose; note = thymine
  modified_base 13: mod_base = OTHER; note = sugar modification: 2'-O-methoxyethylribose; note = backbone modification: 5'-phosphorothioate; note = thymine
  modified_base 14: mod_base = m5c; mod_base = OTHER; note = sugar modification: 2'-O-methoxyethylribose; note = backbone modification: 5'-phosphorothioate
  modified_base 15: mod_base = OTHER; note = sugar modification: 2'-O-methoxyethylribose
tgttcttgtacttca

SEQ ID NO: 927 - RNA, 15 nt, synthetic construct
  source 1..15: mol_type = other RNA; note = Antisense oligonucleotide
  modified_base 1: mod_base = OTHER; note = thymine; note = backbone modification: 5'-phosphorothioate; note = sugar modification: lna
  modified_base 2: mod_base = OTHER; note = backbone modification: 5'-phosphorothioate; note = sugar modification: lna
  modified_base 3: mod_base = OTHER; note = sugar modification: lna; note = thymine; note = backbone modification: 5'-phosphorothioate
  modified_base 4: mod_base = OTHER; note = sugar modification: 2'-O-methoxyethylribose; note = backbone modification: 5'-phosphorothioate; note = thymine
  modified_base 5: mod_base = OTHER; mod_base = m5c; note = sugar modification: 2'-O-methoxyethylribose; note = backbone modification: 5'-phosphorothioate
  modified_base 6: mod_base = OTHER; note = sugar modification: 2'-O-methoxyethylribose; note = backbone modification: 5'-phosphorothioate; note = thymine
  modified_base 7: mod_base = OTHER; note = backbone modification: 5'-phosphorothioate; note = sugar modification: 2'-O-methoxyethylribose; note = thymine
  modified_base 8: mod_base = OTHER; note = sugar modification: 2'-O-methoxyethylribose; note = backbone modification: 5'-phosphorothioate
  modified_base 9: mod_base = OTHER; note = sugar modification: 2'-O-methoxyethylribose; note = thymine; note = backbone modification: 5'-phosphorothioate
  modified_base 10: mod_base = OTHER; note = sugar modification: 2'-O-methoxyethylribose; note = backbone modification: 5'-phosphorothioate
  modified_base 11: mod_base = m5c; mod_base = OTHER; note = backbone modification: 5'-phosphorothioate; note = sugar modification: 2'-O-methoxyethylribose
  modified_base 12: mod_base = OTHER; note = backbone modification: 5'-phosphorothioate; note = thymine; note = sugar modification: 2'-O-methoxyethylribose
  modified_base 13: mod_base = OTHER; note = backbone modification: 5'-phosphorothioate; note = thymine; note = sugar modification: 2'-O-methoxyethylribose
  modified_base 14: mod_base = OTHER; mod_base = m5c; note = backbone modification: 5'-phosphorothioate; note = sugar modification: 2'-O-methoxyethylribose
  modified_base 15: mod_base = OTHER; note = sugar modification: 2'-O-methoxyethylribose
tgttcttgtacttca

SEQ ID NO: 928 - RNA, 15 nt, synthetic construct
  source 1..15: mol_type = other RNA; note = Antisense oligonucleotide
  modified_base 1: mod_base = OTHER; note = backbone modification: 5'-phosphorothioate; note = sugar modification: lna; note = thymine
  modified_base 2: mod_base = OTHER; note = backbone modification: 5'-phosphorothioate; note = sugar modification: 2'-O-methoxyethylribose
  modified_base 3: mod_base = OTHER; note = thymine; note = backbone modification: 5'-phosphorothioate; note = sugar modification: 2'-O-methoxyethylribose
  modified_base 4: mod_base = OTHER; note = thymine; note = sugar modification: 2'-O-methoxyethylribose; note = backbone modification: 5'-phosphorothioate
  modified_base 5: mod_base = OTHER; mod_base = m5c; note = sugar modification: 2'-O-methoxyethylribose; note = backbone modification: 5'-phosphorothioate
  modified_base 6: mod_base = OTHER; note = thymine; note = backbone modification: 5'-phosphorothioate; note = sugar modification: 2'-O-methoxyethylribose
  modified_base 7: mod_base = OTHER; note = sugar modification: 2'-O-methoxyethylribose; note = backbone modification: 5'-phosphorothioate; note = thymine
  modified_base 8: mod_base = OTHER; note = sugar modification: 2'-O-methoxyethylribose; note = backbone modification: 5'-phosphorothioate
  modified_base 9: mod_base = OTHER; note = thymine; note = backbone modification: 5'-phosphorothioate; note = sugar modification: 2'-O-methoxyethylribose
  modified_base 10: mod_base = OTHER; note = backbone modification: 5'-phosphorothioate; note = sugar modification: 2'-O-methoxyethylribose
  modified_base 11: mod_base = OTHER; mod_base = m5c; note = sugar modification: 2'-O-methoxyethylribose; note = backbone modification: 5'-phosphorothioate
  modified_base 12: mod_base = OTHER; note = sugar modification: 2'-O-methoxyethylribose; note = backbone modification: 5'-phosphorothioate; note = thymine
  modified_base 13: mod_base = OTHER; note = backbone modification: 5'-phosphorothioate; note = sugar modification: 2'-O-methoxyethylribose; note = thymine
  modified_base 14: mod_base = m5c; mod_base = OTHER; note = backbone modification: 5'-phosphorothioate; note = sugar modification: 2'-O-methoxyethylribose
  modified_base 15: mod_base = OTHER; note = sugar modification: lna
tgttcttgtacttca

SEQ ID NO: 929 - RNA, 15 nt, synthetic construct
  source 1..15: mol_type = other RNA; note = Antisense oligonucleotide
  modified_base 1: mod_base = OTHER; note = thymine; note = sugar modification: lna; note = backbone modification: 5'-phosphorothioate
  modified_base 2: mod_base = OTHER; note = sugar modification: lna; note = backbone modification: 5'-phosphorothioate
  modified_base 3: mod_base = OTHER; note = sugar modification: 2'-O-methoxyethylribose; note = thymine; note = backbone modification: 5'-phosphorothioate
  modified_base 4: mod_base = OTHER; note = backbone modification: 5'-phosphorothioate; note = sugar modification: 2'-O-methoxyethylribose; note = thymine
  modified_base 5: mod_base = m5c; mod_base = OTHER; note = backbone modification: 5'-phosphorothioate; note = sugar modification: 2'-O-methoxyethylribose
  modified_base 6: mod_base = OTHER; note = sugar modification: 2'-O-methoxyethylribose; note = backbone modification: 5'-phosphorothioate; note = thymine
  modified_base 7: mod_base = OTHER; note = thymine; note = sugar modification: 2'-O-methoxyethylribose; note = backbone modification: 5'-phosphorothioate
  modified_base 8: mod_base = OTHER; note = backbone modification: 5'-phosphorothioate; note = sugar modification: 2'-O-methoxyethylribose
  modified_base 9: mod_base = OTHER; note = sugar modification: 2'-O-methoxyethylribose; note = thymine; note = backbone modification: 5'-phosphorothioate
  modified_base 10: mod_base = OTHER; note = sugar modification: 2'-O-methoxyethylribose; note = backbone modification: 5'-phosphorothioate
  modified_base 11: mod_base = OTHER; mod_base = m5c; note = sugar modification: 2'-O-methoxyethylribose; note = backbone modification: 5'-phosphorothioate
  modified_base 12: mod_base = OTHER; note = backbone modification: 5'-phosphorothioate; note = sugar modification: 2'-O-methoxyethylribose; note = thymine
  modified_base 13: mod_base = OTHER; note = sugar modification: 2'-O-methoxyethylribose; note = thymine; note = backbone modification: 5'-phosphorothioate
  modified_base 14: mod_base = m5c; mod_base = OTHER; note = backbone modification: 5'-phosphorothioate; note = sugar modification: 2'-O-methoxyethylribose
  modified_base 15: mod_base = OTHER; note = sugar modification: lna
tgttcttgtacttca

SEQ ID NO: 930 - RNA, 15 nt, synthetic construct
  source 1..15: mol_type = other RNA; note = Antisense oligonucleotide
  modified_base 1: mod_base = OTHER; note = thymine; note = backbone modification: 5'-phosphorothioate; note = sugar modification: lna
  modified_base 2: mod_base = OTHER; note = backbone modification: 5'-phosphorothioate; note = sugar modification: lna
  modified_base 3: mod_base = OTHER; note = sugar modification: lna; note = thymine; note = backbone modification: 5'-phosphorothioate
  modified_base 4: mod_base = OTHER; note = thymine; note = backbone modification: 5'-phosphorothioate; note = sugar modification: 2'-O-methoxyethylribose
  modified_base 5: mod_base = m5c; mod_base = OTHER; note = backbone modification: 5'-phosphorothioate; note = sugar modification: 2'-O-methoxyethylribose
  modified_base 6: mod_base = OTHER; note = backbone modification: 5'-phosphorothioate; note = thymine; note = sugar modification: 2'-O-methoxyethylribose
  modified_base 7: mod_base = OTHER; note = backbone modification: 5'-phosphorothioate; note = sugar modification: 2'-O-methoxyethylribose; note = thymine
  modified_base 8: mod_base = OTHER; note = backbone modification: 5'-phosphorothioate; note = sugar modification: 2'-O-methoxyethylribose
  modified_base 9: mod_base = OTHER; note = backbone modification: 5'-phosphorothioate; note = thymine; note = sugar modification: 2'-O-methoxyethylribose
  modified_base 10: mod_base = OTHER; note = sugar modification: 2'-O-methoxyethylribose; note = backbone modification: 5'-phosphorothioate
  modified_base 11: mod_base = m5c; mod_base = OTHER; note = sugar modification: 2'-O-methoxyethylribose; note = backbone modification: 5'-phosphorothioate
  modified_base 12: mod_base = OTHER; note = sugar modification: 2'-O-methoxyethylribose; note = backbone modification: 5'-phosphorothioate; note = thymine
  modified_base 13: mod_base = OTHER; note = sugar modification: 2'-O-methoxyethylribose; note = thymine; note = backbone modification: 5'-phosphorothioate
  modified_base 14: mod_base = m5c; mod_base = OTHER; note = backbone modification: 5'-phosphorothioate; note = sugar modification: 2'-O-methoxyethylribose
  modified_base 15: mod_base = OTHER; note = sugar modification: lna
tgttcttgtacttca

SEQ ID NO: 931 - RNA, 15 nt, synthetic construct
  source 1..15: mol_type = other RNA; note = Antisense oligonucleotide
  modified_base 1: mod_base = OTHER; note = sugar modification: lna; note = backbone modification: 5'-phosphorothioate; note = thymine
  modified_base 2: mod_base = OTHER; note = backbone modification: 5'-phosphorothioate; note = sugar modification: 2'-O-methoxyethylribose
  modified_base 3: mod_base = OTHER; note = sugar modification: 2'-O-methoxyethylribose; note = backbone modification: 5'-phosphorothioate; note = thymine
  modified_base 4: mod_base = OTHER; note = sugar modification: 2'-O-methoxyethylribose; note = backbone modification: 5'-phosphorothioate; note = thymine
  modified_base 5: mod_base = m5c; mod_base = OTHER; note = backbone modification: 5'-phosphorothioate; note = sugar modification: 2'-O-methoxyethylribose
  modified_base 6: mod_base = OTHER; note = thymine; note = backbone modification: 5'-phosphorothioate; note = sugar modification: 2'-O-methoxyethylribose
  modified_base 7: mod_base = OTHER; note = backbone modification: 5'-phosphorothioate; note = sugar modification: 2'-O-methoxyethylribose; note = thymine
  modified_base 8: mod_base = OTHER; note = sugar modification: 2'-O-methoxyethylribose; note = backbone modification: 5'-phosphorothioate
  modified_base 9: mod_base = OTHER; note = thymine; note = sugar modification: 2'-O-methoxyethylribose; note = backbone modification: 5'-phosphorothioate
  modified_base 10: mod_base = OTHER; note = backbone modification: 5'-phosphorothioate; note = sugar modification: 2'-O-methoxyethylribose
  modified_base 11: mod_base = m5c; mod_base = OTHER; note = backbone modification: 5'-phosphorothioate; note = sugar modification: 2'-O-methoxyethylribose
  modified_base 12: mod_base = OTHER; note = backbone modification: 5'-phosphorothioate; note = sugar modification: 2'-O-methoxyethylribose; note = thymine
  modified_base 13: mod_base = OTHER; note = sugar modification: 2'-O-methoxyethylribose; note = thymine; note = backbone modification: 5'-phosphorothioate
  modified_base 14: mod_base = OTHER; mod_base = m5c; note = sugar modification: lna; note = backbone modification: 5'-phosphorothioate
  modified_base 15: mod_base = OTHER; note = sugar modification: lna
tgttcttgtacttca

SEQ ID NO: 932 - RNA, 15 nt, synthetic construct
  source 1..15: mol_type = other RNA; note = Antisense oligonucleotide
  modified_base 1: mod_base = OTHER; note = backbone modification: 5'-phosphorothioate; note = thymine; note = sugar modification: lna
  modified_base 2: mod_base = OTHER; note = backbone modification: 5'-phosphorothioate; note = sugar modification: lna
  modified_base 3: mod_base = OTHER; note = sugar modification: 2'-O-methoxyethylribose; note = thymine; note = backbone modification: 5'-phosphorothioate
  modified_base 4: mod_base = OTHER; note = backbone modification: 5'-phosphorothioate; note = sugar modification: 2'-O-methoxyethylribose; note = thymine
  modified_base 5: mod_base = m5c; mod_base = OTHER; note = sugar modification: 2'-O-methoxyethylribose; note = backbone modification: 5'-phosphorothioate
  modified_base 6: mod_base = OTHER; note = backbone modification: 5'-phosphorothioate; note = sugar modification: 2'-O-methoxyethylribose; note = thymine
  modified_base 7: mod_base = OTHER; note = sugar modification: 2'-O-methoxyethylribose; note = thymine; note = backbone modification: 5'-phosphorothioate
  modified_base 8: mod_base = OTHER; note = sugar modification: 2'-O-methoxyethylribose; note = backbone modification: 5'-phosphorothioate
  modified_base 9: mod_base = OTHER; note = backbone modification: 5'-phosphorothioate; note = sugar modification: 2'-O-methoxyethylribose; note = thymine
  modified_base 10: mod_base = OTHER; note = backbone modification: 5'-phosphorothioate; note = sugar modification: 2'-O-methoxyethylribose
  modified_base 11: mod_base = OTHER; mod_base = m5c; note = backbone modification: 5'-phosphorothioate; note = sugar modification: 2'-O-methoxyethylribose
  modified_base 12: mod_base = OTHER; note = sugar modification: 2'-O-methoxyethylribose; note = backbone modification: 5'-phosphorothioate; note = thymine
  modified_base 13: mod_base = OTHER; note = thymine; note = sugar modification: 2'-O-methoxyethylribose; note = backbone modification: 5'-phosphorothioate
  modified_base 14: mod_base = m5c; mod_base = OTHER; note = sugar modification: lna; note = backbone modification: 5'-phosphorothioate
  modified_base 15: mod_base = OTHER; note = sugar modification: lna
tgttcttgtacttca

SEQ ID NO: 933 - RNA, 15 nt, synthetic construct
  source 1..15: mol_type = other RNA; note = Antisense oligonucleotide
  modified_base 1: mod_base = OTHER; note = sugar modification: lna; note = thymine; note = backbone modification: 5'-phosphorothioate
  modified_base 2: mod_base = OTHER; note = backbone modification: 5'-phosphorothioate; note = sugar modification: lna
  modified_base 3: mod_base = OTHER; note = thymine; note = sugar modification: lna; note = backbone modification: 5'-phosphorothioate
  modified_base 4: mod_base = OTHER; note = sugar modification: 2'-O-methoxyethylribose; note = backbone modification: 5'-phosphorothioate; note = thymine
  modified_base 5: mod_base = m5c; mod_base = OTHER; note = sugar modification: 2'-O-methoxyethylribose; note = backbone modification: 5'-phosphorothioate
  modified_base 6: mod_base = OTHER; note = thymine; note = sugar modification: 2'-O-methoxyethylribose; note = backbone modification: 5'-phosphorothioate
  modified_base 7: mod_base = OTHER; note = thymine; note = backbone modification: 5'-phosphorothioate; note = sugar modification: 2'-O-methoxyethylribose
  modified_base 8: mod_base = OTHER; note = backbone modification: 5'-phosphorothioate; note = sugar modification: 2'-O-methoxyethylribose
  modified_base 9: mod_base = OTHER; note = thymine; note = sugar modification: 2'-O-methoxyethylribose; note = backbone modification: 5'-phosphorothioate
  modified_base 10: mod_base = OTHER; note = backbone modification: 5'-phosphorothioate; note = sugar modification: 2'-O-methoxyethylribose
  modified_base 11: mod_base = OTHER; mod_base = m5c; note = backbone modification: 5'-phosphorothioate; note = sugar modification: 2'-O-methoxyethylribose
  modified_base 12: mod_base = OTHER; note = sugar modification: 2'-O-methoxyethylribose; note = backbone modification: 5'-phosphorothioate; note = thymine
  modified_base 13: mod_base = OTHER; note = sugar modification: 2'-O-methoxyethylribose; note = backbone modification: 5'-phosphorothioate; note = thymine
  modified_base 14: mod_base = OTHER; mod_base = m5c; note = backbone modification: 5'-phosphorothioate; note = sugar modification: lna
  modified_base 15: mod_base = OTHER; note = sugar modification: lna
tgttcttgtacttca

SEQ ID NO: 934 - RNA, 15 nt, synthetic construct
  source 1..15: mol_type = other RNA; note = Antisense oligonucleotide
  modified_base 1: mod_base = OTHER; note = backbone modification: 5'-phosphorothioate; note = thymine; note = sugar modification: lna
  modified_base 2: mod_base = OTHER; note = backbone modification: 5'-phosphorothioate; note = sugar modification: lna
  modified_base 3: mod_base = OTHER; note = backbone modification: 5'-phosphorothioate; note = thymine; note = sugar modification: lna
  modified_base 4: mod_base = OTHER; note = sugar modification: lna; note = backbone modification: 5'-phosphorothioate; note = thymine
  modified_base 5: mod_base = m5c; mod_base = OTHER; note = backbone modification: 5'-phosphorothioate; note = sugar modification: 2'-O-methoxyethylribose
  modified_base 6: mod_base = OTHER; note = backbone modification: 5'-phosphorothioate; note = thymine; note = sugar modification: 2'-O-methoxyethylribose
  modified_base 7: mod_base = OTHER; note = thymine; note = sugar modification: 2'-O-methoxyethylribose; note = backbone modification: 5'-phosphorothioate
  modified_base 8: mod_base = OTHER; note = backbone modification: 5'-phosphorothioate; note = sugar modification: 2'-O-methoxyethylribose
  modified_base 9: mod_base = OTHER; note = thymine; note = sugar modification: 2'-O-methoxyethylribose; note = backbone modification: 5'-phosphorothioate
  modified_base 10: mod_base = OTHER; note = sugar modification: 2'-O-methoxyethylribose; note = backbone modification: 5'-phosphorothioate
  modified_base 11: mod_base = m5c; mod_base = OTHER; note = backbone modification: 5'-phosphorothioate; note = sugar modification: 2'-O-methoxyethylribose
  modified_base 12: mod_base = OTHER; note = backbone modification: 5'-phosphorothioate; note = thymine; note = sugar modification: 2'-O-methoxyethylribose
  modified_base 13: mod_base = OTHER; note = thymine; note = sugar modification: 2'-O-methoxyethylribose; note = backbone modification: 5'-phosphorothioate
  modified_base 14: mod_base = m5c; mod_base = OTHER; note = sugar modification: lna; note = backbone modification: 5'-phosphorothioate
  modified_base 15: mod_base = OTHER; note = sugar modification: lna
tgttcttgtacttca

SEQ ID NO: 935 - RNA, 15 nt, synthetic construct
  source 1..15: mol_type = other RNA; note = Antisense oligonucleotide
  modified_base 1: mod_base = OTHER; note = sugar modification: lna; note = thymine; note = backbone modification: 5'-phosphorothioate
  modified_base 2: mod_base = OTHER; note = sugar modification: 2'-O-methoxyethylribose; note = backbone modification: 5'-phosphorothioate
  modified_base 3: mod_base = OTHER; note = sugar modification: 2'-O-methoxyethylribose; note = thymine; note = backbone modification: 5'-phosphorothioate
  modified_base 4: mod_base = OTHER; note = thymine; note = sugar modification: 2'-O-methoxyethylribose; note = backbone modification: 5'-phosphorothioate
  modified_base 5: mod_base = m5c; mod_base = OTHER; note = sugar modification: 2'-O-methoxyethylribose; note = backbone modification: 5'-phosphorothioate
  modified_base 6: mod_base = OTHER; note = sugar modification: 2'-O-methoxyethylribose; note = backbone modification: 5'-phosphorothioate; note = thymine
  modified_base 7: mod_base = OTHER; note = thymine; note = sugar modification: 2'-O-methoxyethylribose; note = backbone modification: 5'-phosphorothioate
  modified_base 8: mod_base = OTHER; note = backbone modification: 5'-phosphorothioate; note = sugar modification: 2'-O-methoxyethylribose
  modified_base 9: mod_base = OTHER; note = thymine; note = sugar modification: 2'-O-methoxyethylribose; note = backbone modification: 5'-phosphorothioate
  modified_base 10: mod_base = OTHER; note = backbone modification: 5'-phosphorothioate; note = sugar modification: 2'-O-methoxyethylribose
  modified_base 11: mod_base = m5c; mod_base = OTHER; note = sugar modification: 2'-O-methoxyethylribose; note = backbone modification: 5'-phosphorothioate
  modified_base 12: mod_base = OTHER; note = backbone modification: 5'-phosphorothioate; note = sugar modification: 2'-O-methoxyethylribose; note = thymine
  modified_base 13: mod_base = OTHER; note = backbone modification: 5'-phosphorothioate; note = sugar modification: lna; note = thymine
  modified_base 14: mod_base = m5c; mod_base = OTHER; note = sugar modification: lna; note = backbone modification: 5'-phosphorothioate
  modified_base 15: mod_base = OTHER; note = sugar modification: lna
tgttcttgtacttca

SEQ ID NO: 936 - RNA, 15 nt, synthetic construct
  source 1..15: mol_type = other RNA; note = Antisense oligonucleotide
  modified_base 1: mod_base = OTHER; note = backbone modification: 5'-phosphorothioate; note = sugar modification: lna; note = thymine
  modified_base 2: mod_base = OTHER; note = sugar modification: lna; note = backbone modification: 5'-phosphorothioate
  modified_base 3: mod_base = OTHER; note = thymine; note = sugar modification: 2'-O-methoxyethylribose; note = backbone modification: 5'-phosphorothioate
  modified_base 4: mod_base = OTHER; note = thymine; note = sugar modification: 2'-O-methoxyethylribose; note = backbone modification: 5'-phosphorothioate
  modified_base 5: mod_base = m5c; mod_base = OTHER; note = backbone modification: 5'-phosphorothioate; note = sugar modification: 2'-O-methoxyethylribose
  modified_base 6: mod_base = OTHER; note = thymine; note = backbone modification: 5'-phosphorothioate; note = sugar modification: 2'-O-methoxyethylribose
  modified_base 7: mod_base = OTHER; note = sugar modification: 2'-O-methoxyethylribose; note = thymine; note = backbone modification: 5'-phosphorothioate
  modified_base 8: mod_base = OTHER; note = sugar modification: 2'-O-methoxyethylribose; note = backbone modification: 5'-phosphorothioate
  modified_base 9: mod_base = OTHER; note = backbone modification: 5'-phosphorothioate; note = sugar modification: 2'-O-methoxyethylribose; note = thymine
  modified_base 10: mod_base = OTHER; note = sugar modification: 2'-O-methoxyethylribose; note = backbone modification: 5'-phosphorothioate
  modified_base 11: mod_base = m5c; mod_base = OTHER; note = backbone modification: 5'-phosphorothioate; note = sugar modification: 2'-O-methoxyethylribose
  modified_base 12: mod_base = OTHER; note = thymine; note = sugar modification: 2'-O-methoxyethylribose; note = backbone modification: 5'-phosphorothioate
  modified_base 13: mod_base = OTHER; note = sugar modification: lna; note = thymine; note = backbone modification: 5'-phosphorothioate
  modified_base 14: mod_base = OTHER; mod_base = m5c; note = sugar modification: lna; note = backbone modification: 5'-phosphorothioate
  modified_base 15: mod_base = OTHER; note = sugar modification: lna
tgttcttgtacttca

SEQ ID NO: 937 - RNA, 15 nt, synthetic construct
  source 1..15: mol_type = other RNA; note = Antisense oligonucleotide
  modified_base 1: mod_base = OTHER; note = backbone modification: 5'-phosphorothioate; note = thymine; note = sugar modification: lna
  modified_base 2: mod_base = OTHER; note = sugar modification: lna; note = backbone modification: 5'-phosphorothioate
  modified_base 3: mod_base = OTHER; note = backbone modification: 5'-phosphorothioate; note = sugar modification: lna; note = thymine
  modified_base 4: mod_base = OTHER; note = sugar modification: lna; note = thymine; note = backbone modification: 5'-phosphorothioate
  modified_base 5: mod_base = m5c; mod_base = OTHER; note = backbone modification: 5'-phosphorothioate; note = sugar modification: 2'-O-methoxyethylribose
  modified_base 6: mod_base = OTHER; note = thymine; note = sugar modification: 2'-O-methoxyethylribose; note = backbone modification: 5'-phosphorothioate
  modified_base 7: mod_base = OTHER; note = sugar modification: 2'-O-methoxyethylribose; note = thymine; note = backbone modification: 5'-phosphorothioate
  modified_base 8: mod_base = OTHER; note = sugar modification: 2'-O-methoxyethylribose; note = backbone modification: 5'-phosphorothioate
  modified_base 9: mod_base = OTHER; note = thymine; note = backbone modification: 5'-phosphorothioate; note = sugar modification: 2'-O-methoxyethylribose
  modified_base 10: mod_base = OTHER; note = sugar modification: 2'-O-methoxyethylribose; note = backbone modification: 5'-phosphorothioate
  modified_base 11: mod_base = m5c; mod_base = OTHER; note = backbone modification: 5'-phosphorothioate; note = sugar modification: 2'-O-methoxyethylribose
  modified_base 12: mod_base = OTHER; note = backbone modification: 5'-phosphorothioate; note = sugar modification: 2'-O-methoxyethylribose; note = thymine
  modified_base 13: mod_base = OTHER; note = thymine; note = backbone modification: 5'-phosphorothioate; note = sugar modification: lna
  modified_base 14: mod_base = m5c; mod_base = OTHER; note = sugar modification: lna; note = backbone modification: 5'-phosphorothioate
  modified_base 15: mod_base = OTHER; note = sugar modification: lna
tgttcttgtacttca

SEQ ID NO: 938 - RNA, 15 nt, synthetic construct
  source 1..15: mol_type = other RNA; note = Antisense oligonucleotide
  modified_base 1: mod_base = OTHER; note = sugar modification: lna; note = thymine; note = backbone modification: 5'-phosphorothioate
  modified_base 2: mod_base = OTHER; note = backbone modification: 5'-phosphorothioate; note = sugar modification: lna
  modified_base 3: mod_base = OTHER; note = backbone modification: 5'-phosphorothioate; note = sugar modification: 2'-O-methoxyethylribose; note = thymine
  modified_base 4: mod_base = OTHER; note = sugar modification: 2'-O-methoxyethylribose; note = thymine; note = backbone modification: 5'-phosphorothioate
  modified_base 5: mod_base = m5c; mod_base = OTHER; note = backbone modification: 5'-phosphorothioate; note = sugar modification: 2'-O-methoxyethylribose
  modified_base 6: mod_base = OTHER; note = sugar modification: 2'-O-methoxyethylribose; note = thymine; note = backbone modification: 5'-phosphorothioate
  modified_base 7: mod_base = OTHER; note = thymine; note = backbone modification: 5'-phosphorothioate; note = sugar modification: 2'-O-methoxyethylribose
  modified_base 8: mod_base = OTHER; note = sugar modification: 2'-O-methoxyethylribose; note = backbone modification: 5'-phosphorothioate
  modified_base 9: mod_base = OTHER; note = thymine; note = sugar modification: 2'-O-methoxyethylribose; note = backbone modification: 5'-phosphorothioate
  modified_base 10: mod_base = OTHER; note = sugar modification: 2'-O-methoxyethylribose; note = backbone modification: 5'-phosphorothioate
  modified_base 11: mod_base = OTHER; mod_base = m5c; note = sugar modification: 2'-O-methoxyethylribose; note = backbone modification: 5'-phosphorothioate
  modified_base 12: mod_base = OTHER; note = thymine; note = sugar modification: lna; note = backbone modification: 5'-phosphorothioate
  modified_base 13: mod_base = OTHER; note = backbone modification: 5'-phosphorothioate; note = thymine; note = sugar modification: lna
  modified_base 14: mod_base = m5c; mod_base = OTHER; note = backbone modification: 5'-phosphorothioate; note = sugar modification: lna
  modified_base 15: mod_base = OTHER; note = sugar modification: lna
tgttcttgtacttca

SEQ ID NO: 939 - RNA, 15 nt, synthetic construct
  source 1..15: mol_type = other RNA; note = Antisense oligonucleotide
  modified_base 1: mod_base = OTHER; note = thymine; note = sugar modification: lna; note = backbone modification: 5'-phosphorothioate
  modified_base 2: mod_base = OTHER; note = backbone modification: 5'-phosphorothioate; note = sugar modification: lna
  modified_base 3: mod_base = OTHER; note = sugar modification: lna; note = thymine; note = backbone modification: 5'-phosphorothioate
  modified_base 4: mod_base = OTHER; note = backbone modification: 5'-phosphorothioate; note = sugar modification: 2'-O-methoxyethylribose; note = thymine
  modified_base 5: mod_base = m5c; mod_base = OTHER; note = backbone modification: 5'-phosphorothioate; note = sugar modification: 2'-O-methoxyethylribose
  modified_base 6: mod_base = OTHER; note = thymine; note = sugar modification: 2'-O-methoxyethylribose; note = backbone modification: 5'-phosphorothioate
  modified_base 7: mod_base = OTHER; note = sugar modification: 2'-O-methoxyethylribose; note = backbone modification: 5'-phosphorothioate; note = thymine
  modified_base 8: mod_base = OTHER; note = backbone modification: 5'-phosphorothioate; note = sugar modification: 2'-O-methoxyethylribose
  modified_base 9: mod_base = OTHER; note = thymine; note = sugar modification: 2'-O-methoxyethylribose; note = backbone modification: 5'-phosphorothioate
  modified_base 10: mod_base = OTHER; note = backbone modification: 5'-phosphorothioate; note = sugar modification: 2'-O-methoxyethylribose
  modified_base 11: mod_base = m5c; mod_base = OTHER; note = backbone modification: 5'-phosphorothioate; note = sugar modification: 2'-O-methoxyethylribose
  modified_base 12: mod_base = OTHER; note = sugar modification: lna; note = backbone modification: 5'-phosphorothioate; note = thymine
  modified_base 13: mod_base = OTHER; note = thymine; note = sugar modification: lna; note = backbone modification: 5'-phosphorothioate
  modified_base 14: mod_base = OTHER; mod_base = m5c; note = sugar modification: lna; note = backbone modification: 5'-phosphorothioate
  modified_base 15: mod_base = OTHER; note = sugar modification: lna
tgttcttgtacttca

SEQ ID NO: 940 - RNA, 15 nt, synthetic construct
  source 1..15: mol_type = other RNA; note = Antisense oligonucleotide
  modified_base 1: mod_base = OTHER; note = backbone modification: 5'-phosphorothioate; note = sugar modification: lna; note = thymine
  modified_base 2: mod_base = OTHER; note = sugar modification: lna; note = backbone modification: 5'-phosphorothioate
  modified_base 3: mod_base = OTHER; note = sugar modification: lna; note = thymine; note = backbone modification: 5'-phosphorothioate
  modified_base 4: mod_base = OTHER; note = sugar modification: lna; note = thymine; note = backbone modification: 5'-phosphorothioate
  modified_base 5: mod_base = OTHER; mod_base = m5c; note = backbone modification: 5'-phosphorothioate; note = sugar modification: 2'-O-methoxyethylribose
  modified_base 6: mod_base = OTHER; note = sugar modification: 2'-O-methoxyethylribose; note = backbone modification: 5'-phosphorothioate; note = thymine
  modified_base 7: mod_base = OTHER; note = backbone modification: 5'-phosphorothioate; note = sugar modification: 2'-O-methoxyethylribose; note = thymine
  modified_base 8: mod_base = OTHER; note = backbone modification: 5'-phosphorothioate; note = sugar modification: 2'-O-methoxyethylribose
  modified_base 9: mod_base = OTHER; note = thymine; note = backbone modification: 5'-phosphorothioate; note = sugar modification: 2'-O-methoxyethylribose
  modified_base 10: mod_base = OTHER; note = sugar modification: 2'-O-methoxyethylribose; note = backbone modification: 5'-phosphorothioate
  modified_base 11: mod_base = OTHER; mod_base = m5c; note = backbone modification: 5'-phosphorothioate; note = sugar modification: 2'-O-methoxyethylribose
  modified_base 12: mod_base = OTHER; note = sugar modification: lna; note = thymine; note = backbone modification: 5'-phosphorothioate
  modified_base 13: mod_base = OTHER; note = sugar modification: lna; note = backbone modification: 5'-phosphorothioate; note = thymine
  modified_base 14: mod_base = m5c; mod_base = OTHER; note = backbone modification: 5'-phosphorothioate; note = sugar modification: lna
  modified_base 15: mod_base = OTHER; note = sugar modification: lna
tgttcttgtacttca

SEQ ID NO: 941 - RNA, 15 nt, synthetic construct
  source 1..15: mol_type = other RNA; note = Antisense oligonucleotide
  modified_base 1: mod_base = OTHER; note = backbone modification: 5'-phosphorothioate; note = sugar modification: lna; note = thymine
  modified_base 2: mod_base = OTHER; note = backbone modification: 5'-phosphorothioate; note = sugar modification: lna
  modified_base 3: mod_base = OTHER; note = backbone modification: 5'-phosphorothioate; note = thymine; note = sugar modification: lna
  modified_base 4: mod_base = OTHER; note = sugar modification: lna; note = backbone modification: 5'-phosphorothioate; note = thymine
  modified_base 5: mod_base = m5c; mod_base = OTHER; note = sugar modification: lna; note = backbone modification: 5'-phosphorothioate
  modified_base 6: mod_base = OTHER; note = thymine; note = sugar modification: 2'-O-methoxyethylribose; note = backbone modification: 5'-phosphorothioate
  modified_base 7: mod_base = OTHER; note = sugar modification: 2'-O-methoxyethylribose; note = thymine; note = backbone modification: 5'-phosphorothioate
  modified_base 8: mod_base = OTHER; note = sugar modification: 2'-O-methoxyethylribose; note = backbone modification: 5'-phosphorothioate
  modified_base 9: mod_base = OTHER; note = sugar modification: 2'-O-methoxyethylribose; note = thymine; note = backbone modification: 5'-phosphorothioate
  modified_base 10: mod_base = OTHER; note = sugar modification: 2'-O-methoxyethylribose; note = backbone modification: 5'-phosphorothioate
  modified_base 11: mod_base = m5c; mod_base = OTHER; note = sugar modification: lna; note = backbone modification: 5'-phosphorothioate
  modified_base 12: mod_base = OTHER; note = sugar modification: lna; note = backbone modification: 5'-phosphorothioate; note = thymine
  modified_base 13: mod_base = OTHER; note = sugar modification: lna; note = thymine; note = backbone modification: 5'-phosphorothioate
  modified_base 14: mod_base = m5c; mod_base = OTHER; note = backbone modification: 5'-phosphorothioate; note = sugar modification: lna
  modified_base 15: mod_base = OTHER; note = sugar modification: lna
tgttcttgtacttca

SEQ ID NO: 942 - RNA, 15 nt, synthetic construct
  source 1..15: mol_type = other RNA; note = Antisense oligonucleotide
  modified_base 1: mod_base = OTHER; note = sugar modification: 2'-O-methoxyethylribose; note = backbone modification: 5'-phosphorothioate; note = thymine
  modified_base 2: mod_base = OTHER; note = sugar modification: 2'-O-methoxyethylribose; note = backbone modification: 5'-phosphorothioate
  modified_base 3: mod_base = OTHER; note = backbone modification: 5'-phosphorothioate; note = thymine; note = sugar modification: 2'-O-methoxyethylribose
  modified_base 4: mod_base = OTHER; note = sugar modification: 2'-O-methoxyethylribose; note = thymine; note = backbone modification: 5'-phosphorothioate
  modified_base 5: mod_base = m5c; mod_base = OTHER; note = sugar modification: 2'-O-methoxyethylribose; note = backbone modification: 5'-phosphorothioate
  modified_base 6: mod_base = OTHER; note = backbone modification: 5'-phosphorothioate; note = sugar modification: 2'-O-methoxyethylribose; note = thymine
  modified_base 7: mod_base = OTHER; note = thymine; note = backbone modification: 5'-phosphorothioate; note = sugar modification: 2'-O-methoxyethylribose
  modified_base 8: mod_base = OTHER; note = backbone modification: 5'-phosphorothioate; note = sugar modification: 2'-O-methoxyethylribose
  modified_base 9: mod_base = OTHER; note = sugar modification: 2'-O-methoxyethylribose; note = thymine; note = backbone modification: 5'-phosphorothioate
  modified_base 10: mod_base = OTHER; note = backbone modification: 5'-phosphorothioate; note = sugar modification: 2'-O-methoxyethylribose
  modified_base 11: mod_base = m5c; mod_base = OTHER; note = sugar modification: 2'-O-methoxyethylribose; note = backbone modification: 5'-phosphorothioate
  modified_base 12: mod_base = OTHER; note = sugar modification: 2'-O-methoxyethylribose; note = backbone modification: 5'-phosphorothioate; note = thymine
  modified_base 13: mod_base = OTHER; note = thymine; note = backbone modification: 5'-phosphorothioate; note = sugar modification: 2'-O-methoxyethylribose
  modified_base 14: mod_base = m5c; mod_base = OTHER; note = sugar modification: lna; note = backbone modification: 5'-phosphorothioate
  modified_base 15: mod_base = OTHER; note = sugar modification: lna
tgttcttgtacttca

SEQ ID NO: 943 - RNA, 15 nt, synthetic construct
  source 1..15: mol_type = other RNA; note = Antisense oligonucleotide
  modified_base 1: mod_base = OTHER; note = thymine; note = backbone modification: 5'-phosphorothioate; note = sugar modification: 2'-O-methoxyethylribose
  modified_base 2: mod_base = OTHER; note = backbone modification: 5'-phosphorothioate; note = sugar modification: 2'-O-methoxyethylribose
  modified_base 3: mod_base = OTHER; note = thymine; note = sugar modification: 2'-O-methoxyethylribose; note = backbone modification: 5'-phosphorothioate
  modified_base 4: mod_base = OTHER; note = sugar modification: 2'-O-methoxyethylribose; note = thymine; note = backbone modification: 5'-phosphorothioate
  modified_base 5: mod_base = OTHER; mod_base = m5c; note = sugar modification: 2'-O-methoxyethylribose; note = backbone modification: 5'-phosphorothioate
  modified_base 6: mod_base = OTHER; note = sugar modification: 2'-O-methoxyethylribose; note = backbone modification: 5'-phosphorothioate; note = thymine
  modified_base 7: mod_base = OTHER; note = sugar modification: 2'-O-methoxyethylribose; note = thymine; note = backbone modification: 5'-phosphorothioate
  modified_base 8: mod_base = OTHER; note = backbone modification: 5'-phosphorothioate; note = sugar modification: 2'-O-methoxyethylribose
  modified_base 9: mod_base = OTHER; note = thymine; note = backbone modification: 5'-phosphorothioate; note = sugar modification: 2'-O-methoxyethylribose
  modified_base 10: mod_base = OTHER; note = backbone modification: 5'-phosphorothioate; note = sugar modification: 2'-O-methoxyethylribose
  modified_base 11: mod_base = m5c; mod_base = OTHER; note = sugar modification: 2'-O-methoxyethylribose; note = backbone modification: 5'-phosphorothioate
  modified_base 12: mod_base = OTHER; note = thymine; note = sugar modification: 2'-O-methoxyethylribose; note = backbone modification: 5'-phosphorothioate
  modified_base 13: mod_base = OTHER; note = backbone modification: 5'-phosphorothioate; note = sugar modification: lna; note = thymine
  modified_base 14: mod_base = m5c; mod_base = OTHER; note = backbone modification: 5'-phosphorothioate; note = sugar modification: lna
  modified_base 15: mod_base = OTHER; note = sugar modification: lna
tgttcttgtacttca

SEQ ID NO: 944 - RNA, 15 nt, synthetic construct
  source 1..15: mol_type = other RNA; note = Antisense oligonucleotide
  modified_base 1: mod_base = OTHER; note = sugar modification: lna; note = backbone modification: 5'-phosphorothioate
  modified_base 2: mod_base = OTHER; note = backbone modification: 5'-phosphorothioate; note = sugar modification: 2'-O-methoxyethylribose; note = thymine
  modified_base 3: mod_base = OTHER; note = backbone modification: 5'-phosphorothioate; note = sugar modification: 2'-O-methoxyethylribose
  modified_base 4: mod_base = OTHER; note = backbone modification: 5'-phosphorothioate; note = sugar modification: 2'-O-methoxyethylribose; note = thymine
  modified_base 5: mod_base = OTHER; note = thymine; note = sugar modification: 2'-O-methoxyethylribose; note = backbone modification: 5'-phosphorothioate
  modified_base 6: mod_base = m5c; mod_base = OTHER; note = sugar modification: 2'-O-methoxyethylribose; note = backbone modification: 5'-phosphorothioate
  modified_base 7: mod_base = OTHER; note = thymine; note = backbone modification: 5'-phosphorothioate; note = sugar modification: 2'-O-methoxyethylribose
  modified_base 8: mod_base = OTHER; note = thymine; note = sugar modification: 2'-O-methoxyethylribose; note = backbone modification: 5'-phosphorothioate
  modified_base 9: mod_base = OTHER; note = sugar modification: 2'-O-methoxyethylribose; note = backbone modification: 5'-phosphorothioate
  modified_base 10: mod_base = OTHER; note = sugar modification: 2'-O-methoxyethylribose; note = thymine; note = backbone modification: 5'-phosphorothioate
  modified_base 11: mod_base = OTHER; note = sugar modification: 2'-O-methoxyethylribose; note = backbone modification: 5'-phosphorothioate
  modified_base 12: mod_base = OTHER; mod_base = m5c; note = sugar modification: 2'-O-methoxyethylribose; note = backbone modification: 5'-phosphorothioate
  modified_base 13: mod_base = OTHER; note = thymine; note = backbone modification: 5'-phosphorothioate; note = sugar modification: 2'-O-methoxyethylribose
  modified_base 14: mod_base = OTHER; note = sugar modification: 2'-O-methoxyethylribose; note = thymine; note = backbone modification: 5'-phosphorothioate
  modified_base 15: mod_base = m5c; mod_base = OTHER; note = sugar modification: 2'-O-methoxyethylribose
gtgttcttgtacttc

SEQ ID NO: 945 - RNA, 15 nt, synthetic construct
  source 1..15: mol_type = other RNA; note = Antisense oligonucleotide
  modified_base 1: mod_base = OTHER; note = backbone modification: 5'-phosphorothioate; note = sugar modification: lna
  modified_base 2: mod_base = OTHER; note = backbone modification: 5'-phosphorothioate; note = sugar modification: lna; note = thymine
  modified_base 3: mod_base = OTHER; note = backbone modification: 5'-phosphorothioate; note = sugar modification: 2'-O-methoxyethylribose
  modified_base 4: mod_base = OTHER; note = thymine; note = sugar modification: 2'-O-methoxyethylribose; note = backbone modification: 5'-phosphorothioate
  modified_base 5: mod_base = OTHER; note = sugar modification: 2'-O-methoxyethylribose; note = backbone modification: 5'-phosphorothioate; note = thymine
  modified_base 6: mod_base = OTHER; mod_base = m5c; note = backbone modification: 5'-phosphorothioate; note = sugar modification: 2'-O-methoxyethylribose
  modified_base 7: mod_base = OTHER; note = thymine; note = backbone modification: 5'-phosphorothioate; note = sugar modification: 2'-O-methoxyethylribose
  modified_base 8: mod_base = OTHER; note = thymine; note = backbone modification: 5'-phosphorothioate; note = sugar modification: 2'-O-methoxyethylribose
  modified_base 9: mod_base = OTHER; note = backbone modification: 5'-phosphorothioate; note = sugar modification: 2'-O-methoxyethylribose
  modified_base 10: mod_base = OTHER; note = thymine; note = sugar modification: 2'-O-methoxyethylribose; note = backbone modification: 5'-phosphorothioate
  modified_base 11: mod_base = OTHER; note = sugar modification: 2'-O-methoxyethylribose; note = backbone modification: 5'-phosphorothioate
  modified_base 12: mod_base = OTHER; mod_base = m5c; note = backbone modification: 5'-phosphorothioate; note = sugar modification: 2'-O-methoxyethylribose
  modified_base 13: mod_base = OTHER; note = backbone modification: 5'-phosphorothioate; note = thymine; note = sugar modification: 2'-O-methoxyethylribose
  modified_base 14: mod_base = OTHER; note = sugar modification: 2'-O-methoxyethylribose; note = backbone modification: 5'-phosphorothioate; note = thymine
  modified_base 15: mod_base = OTHER; mod_base = m5c; note = sugar modification: 2'-O-methoxyethylribose
gtgttcttgtacttc

SEQ ID NO: 946 - RNA, 15 nt, synthetic construct
  source 1..15: mol_type = other RNA; note = Antisense oligonucleotide
  modified_base 1: mod_base = OTHER; note = backbone modification: 5'-phosphorothioate; note = sugar modification: lna
  modified_base 2: mod_base = OTHER; note = backbone modification: 5'-phosphorothioate; note = thymine; note = sugar modification: lna
  modified_base 3: mod_base = OTHER; note = sugar modification: lna; note = backbone modification: 5'-phosphorothioate
  modified_base 4: mod_base = OTHER; note = sugar modification: 2'-O-methoxyethylribose; note = backbone modification: 5'-phosphorothioate; note = thymine
  modified_base 5: mod_base = OTHER; note = thymine; note = backbone modification: 5'-phosphorothioate; note = sugar modification: 2'-O-methoxyethylribose
  modified_base 6: mod_base = m5c; mod_base = OTHER; note = sugar modification: 2'-O-methoxyethylribose; note = backbone modification: 5'-phosphorothioate
  modified_base 7: mod_base = OTHER; note = sugar modification: 2'-O-methoxyethylribose; note = thymine; note = backbone modification: 5'-phosphorothioate
  modified_base 8: mod_base = OTHER; note = sugar modification: 2'-O-methoxyethylribose; note = backbone modification: 5'-phosphorothioate; note = thymine
  modified_base 9: mod_base = OTHER; note = sugar modification: 2'-O-methoxyethylribose; note = backbone modification: 5'-phosphorothioate
  modified_base 10: mod_base = OTHER; note = thymine; note = sugar modification: 2'-O-methoxyethylribose; note = backbone modification: 5'-phosphorothioate
  modified_base 11: mod_base = OTHER; note = backbone modification: 5'-phosphorothioate; note = sugar modification: 2'-O-methoxyethylribose
  modified_base 12: mod_base = m5c; mod_base = OTHER; note = sugar modification: 2'-O-methoxyethylribose; note = backbone modification: 5'-phosphorothioate
  modified_base 13: mod_base = OTHER; note = thymine; note = backbone modification: 5'-phosphorothioate; note = sugar modification: 2'-O-methoxyethylribose
  modified_base 14: mod_base = OTHER; note = backbone modification: 5'-phosphorothioate; note = sugar modification: 2'-O-methoxyethylribose; note = thymine
  modified_base 15: mod_base = OTHER; mod_base = m5c; note = sugar modification: 2'-O-methoxyethylribose
gtgttcttgtacttc

SEQ ID NO: 947 - RNA, 15 nt, synthetic construct
  source 1..15: mol_type = other RNA; note = Antisense oligonucleotide
  modified_base 1: mod_base = OTHER; note = sugar modification: lna; note = backbone modification: 5'-phosphorothioate
  modified_base 2: mod_base = OTHER; note = sugar modification: 2'-O-methoxyethylribose; note = backbone modification: 5'-phosphorothioate; note = thymine
  modified_base 3: mod_base = OTHER; note = sugar modification: 2'-O-methoxyethylribose; note = backbone modification: 5'-phosphorothioate
  modified_base 4: mod_base = OTHER; note = thymine; note = sugar modification: 2'-O-methoxyethylribose; note = backbone modification: 5'-phosphorothioate
  modified_base 5: mod_base = OTHER; note = sugar modification: 2'-O-methoxyethylribose; note = thymine; note = backbone modification: 5'-phosphorothioate
  modified_base 6: mod_base = OTHER; mod_base = m5c; note = sugar modification: 2'-O-methoxyethylribose; note = backbone modification: 5'-phosphorothioate
  modified_base 7: mod_base = OTHER; note = backbone modification: 5'-phosphorothioate; note = sugar modification: 2'-O-methoxyethylribose; note = thymine
  modified_base 8: mod_base = OTHER; note = thymine; note = backbone modification: 5'-phosphorothioate; note = sugar modification: 2'-O-methoxyethylribose
  modified_base 9: mod_base = OTHER; note = sugar modification: 2'-O-methoxyethylribose; note = backbone modification: 5'-phosphorothioate
  modified_base 10: mod_base = OTHER; note = thymine; note = sugar modification: 2'-O-methoxyethylribose; note = backbone modification: 5'-phosphorothioate
  modified_base 11: mod_base = OTHER; note = sugar modification: 2'-O-methoxyethylribose; note = backbone modification: 5'-phosphorothioate
  modified_base 12: mod_base = m5c; mod_base = OTHER; note = backbone modification: 5'-phosphorothioate; note = sugar modification: 2'-O-methoxyethylribose
  modified_base 13: mod_base = OTHER; note = backbone modification: 5'-phosphorothioate; note = thymine; note = sugar modification: 2'-O-methoxyethylribose
  modified_base 14: mod_base = OTHER; note = backbone modification: 5'-phosphorothioate; note = sugar modification: 2'-O-methoxyethylribose; note = thymine
  modified_base 15: mod_base = OTHER; mod_base = m5c; note = sugar modification: lna
gtgttcttgtacttc

SEQ ID NO: 948 - RNA, 15 nt, synthetic construct
  source 1..15: mol_type = other RNA; note = Antisense oligonucleotide
  modified_base 1: mod_base = OTHER; note = backbone modification: 5'-phosphorothioate; note = sugar modification: lna
  modified_base 2: mod_base = OTHER; note = thymine; note = backbone modification: 5'-phosphorothioate; note = sugar modification: lna
  modified_base 3: mod_base = OTHER; note = backbone modification: 5'-phosphorothioate; note = sugar modification: 2'-O-methoxyethylribose
  modified_base 4: mod_base = OTHER; note = backbone modification: 5'-phosphorothioate; note = thymine; note = sugar modification: 2'-O-methoxyethylribose
  modified_base 5: mod_base = OTHER; note = thymine; note = sugar modification: 2'-O-methoxyethylribose; note = backbone modification: 5'-phosphorothioate
  modified_base 6: mod_base = m5c; mod_base = OTHER; note = backbone modification: 5'-phosphorothioate; note = sugar modification: 2'-O-methoxyethylribose
  modified_base 7: mod_base = OTHER; note = sugar modification: 2'-O-methoxyethylribose; note = backbone modification: 5'-phosphorothioate; note = thymine
  modified_base 8: mod_base = OTHER; note = sugar modification: 2'-O-methoxyethylribose; note = backbone modification: 5'-phosphorothioate; note = thymine
  modified_base 9: mod_base = OTHER; note = sugar modification: 2'-O-methoxyethylribose; note = backbone modification: 5'-phosphorothioate
  modified_base 10: mod_base = OTHER; note = sugar modification: 2'-O-methoxyethylribose; note = backbone modification: 5'-phosphorothioate; note = thymine
  modified_base 11: mod_base = OTHER; note = sugar modification: 2'-O-methoxyethylribose; note = backbone modification: 5'-phosphorothioate
  modified_base 12: mod_base = m5c; mod_base = OTHER; note = sugar modification: 2'-O-methoxyethylribose; note = backbone modification: 5'-phosphorothioate
  modified_base 13: mod_base = OTHER; note = backbone modification: 5'-phosphorothioate; note = sugar modification: 2'-O-methoxyethylribose; note = thymine
  modified_base 14: mod_base = OTHER; note = thymine; note = sugar modification: 2'-O-methoxyethylribose; note = backbone modification: 5'-phosphorothioate
  modified_base 15: mod_base = m5c; mod_base = OTHER; note = sugar modification: lna
gtgttcttgtacttc

SEQ ID NO: 949 - RNA, 15 nt, synthetic construct
  source 1..15: mol_type = other RNA; note = Antisense oligonucleotide
  modified_base 1: mod_base = OTHER; note = backbone modification: 5'-phosphorothioate; note = sugar modification: lna
  modified_base 2: mod_base = OTHER; note = thymine; note = sugar modification: lna; note = backbone modification: 5'-phosphorothioate
  modified_base 3: mod_base = OTHER; note = backbone modification: 5'-phosphorothioate; note = sugar modification: lna
  modified_base 4: mod_base = OTHER; note = sugar modification: 2'-O-methoxyethylribose; note = thymine; note = backbone modification: 5'-phosphorothioate
  modified_base 5: mod_base = OTHER; note = thymine; note = backbone modification: 5'-phosphorothioate; note = sugar modification: 2'-O-methoxyethylribose
  modified_base 6: mod_base = m5c; mod_base = OTHER; note = backbone modification: 5'-phosphorothioate; note = sugar modification: 2'-O-methoxyethylribose
  modified_base 7: mod_base = OTHER; note = sugar modification: 2'-O-methoxyethylribose; note = backbone modification: 5'-phosphorothioate; note = thymine
  modified_base 8: mod_base = OTHER; note = backbone modification: 5'-phosphorothioate; note = sugar modification: 2'-O-methoxyethylribose; note = thymine
  modified_base 9: mod_base = OTHER; note = backbone modification: 5'-phosphorothioate; note = sugar modification: 2'-O-methoxyethylribose
  modified_base 10: mod_base = OTHER; note = backbone modification: 5'-phosphorothioate; note = sugar modification: 2'-O-methoxyethylribose; note = thymine
  modified_base 11: mod_base = OTHER; note = sugar modification: 2'-O-methoxyethylribose; note = backbone modification: 5'-phosphorothioate
  modified_base 12: mod_base = OTHER; mod_base = m5c; note = sugar modification: 2'-O-methoxyethylribose; note = backbone modification: 5'-phosphorothioate
  modified_base 13: mod_base = OTHER; note = thymine; note = sugar modification: 2'-O-methoxyethylribose; note = backbone modification: 5'-phosphorothioate
  modified_base 14: mod_base = OTHER; note = thymine; note = backbone modification: 5'-phosphorothioate; note = sugar modification: 2'-O-methoxyethylribose
  modified_base 15: mod_base = m5c; mod_base = OTHER; note = sugar modification: lna
gtgttcttgtacttc

SEQ ID NO: 950 - RNA, 15 nt, synthetic construct
  source 1..15: mol_type = other RNA; note = Antisense oligonucleotide
  modified_base 1: mod_base = OTHER; note = sugar modification: lna; note = backbone modification: 5'-phosphorothioate
  modified_base 2: mod_base = OTHER; note = thymine; note = backbone modification: 5'-phosphorothioate; note = sugar modification: 2'-O-methoxyethylribose
  modified_base 3: mod_base = OTHER; note = backbone modification: 5'-phosphorothioate; note = sugar modification: 2'-O-methoxyethylribose
  modified_base 4: mod_base = OTHER; note = backbone modification: 5'-phosphorothioate; note = thymine; note = sugar modification: 2'-O-methoxyethylribose
  modified_base 5: mod_base = OTHER; note = thymine; note = sugar modification: 2'-O-methoxyethylribose; note = backbone modification: 5'-phosphorothioate
  modified_base 6: mod_base = m5c; mod_base = OTHER; note = sugar modification: 2'-O-methoxyethylribose; note = backbone modification: 5'-phosphorothioate
  modified_base 7: mod_base = OTHER; note = thymine; note = backbone modification: 5'-phosphorothioate; note = sugar modification: 2'-O-methoxyethylribose
  modified_base 8: mod_base = OTHER; note = backbone modification: 5'-phosphorothioate; note = thymine; note = sugar modification: 2'-O-methoxyethylribose
  modified_base 9: mod_base = OTHER; note = sugar modification: 2'-O-methoxyethylribose; note = backbone modification: 5'-phosphorothioate
  modified_base 10: mod_base = OTHER; note = sugar modification: 2'-O-methoxyethylribose; note = thymine; note = backbone modification: 5'-phosphorothioate
  modified_base 11: mod_base = OTHER; note = sugar modification: 2'-O-methoxyethylribose; note = backbone modification: 5'-phosphorothioate
  modified_base 12: mod_base = OTHER; mod_base = m5c; note = sugar modification: 2'-O-methoxyethylribose; note = backbone modification: 5'-phosphorothioate
  modified_base 13: mod_base = OTHER; note = sugar modification: 2'-O-methoxyethylribose; note = backbone modification: 5'-phosphorothioate; note = thymine
  modified_base 14: mod_base = OTHER; note = sugar modification: lna; note = backbone modification: 5'-phosphorothioate; note = thymine
  modified_base 15: mod_base = m5c; mod_base = OTHER; note = sugar modification: lna
gtgttcttgtacttc

SEQ ID NO: 951 - RNA, 15 nt, synthetic construct
  source 1..15: mol_type = other RNA; note = Antisense oligonucleotide
  modified_base 1: mod_base = OTHER; note = sugar modification: lna; note = backbone modification: 5'-phosphorothioate
  modified_base 2: mod_base = OTHER; note = thymine; note = sugar modification: lna; note = backbone modification: 5'-phosphorothioate
  modified_base 3: mod_base = OTHER; note = sugar modification: 2'-O-methoxyethylribose; note = backbone modification: 5'-phosphorothioate
  modified_base 4: mod_base = OTHER; note = backbone modification: 5'-phosphorothioate; note = sugar modification: 2'-O-methoxyethylribose; note = thymine
  modified_base 5: mod_base = OTHER; note = sugar modification: 2'-O-methoxyethylribose; note = backbone modification: 5'-phosphorothioate; note = thymine
  modified_base 6: mod_base = OTHER; mod_base = m5c; note = sugar modification: 2'-O-methoxyethylribose; note = backbone modification: 5'-phosphorothioate
  modified_base 7: mod_base = OTHER; note = backbone modification: 5'-phosphorothioate; note = sugar modification: 2'-O-methoxyethylribose; note = thymine
  modified_base 8: mod_base = OTHER; note = sugar modification: 2'-O-methoxyethylribose; note = thymine; note = backbone modification: 5'-phosphorothioate
  modified_base 9: mod_base = OTHER; note = backbone modification: 5'-phosphorothioate; note = sugar modification: 2'-O-methoxyethylribose
  modified_base 10: mod_base = OTHER; note = thymine; note = backbone modification: 5'-phosphorothioate; note = sugar modification: 2'-O-methoxyethylribose
  modified_base 11: mod_base = OTHER; note = backbone modification: 5'-phosphorothioate; note = sugar modification: 2'-O-methoxyethylribose
  modified_base 12: mod_base = OTHER; mod_base = m5c; note = backbone modification: 5'-phosphorothioate; note = sugar modification: 2'-O-methoxyethylribose
  modified_base 13: mod_base = OTHER; note = backbone modification: 5'-phosphorothioate; note = thymine; note = sugar modification: 2'-O-methoxyethylribose
  modified_base 14: mod_base = OTHER; note = thymine; note = backbone modification: 5'-phosphorothioate; note = sugar modification: lna
  modified_base 15: mod_base = m5c; mod_base = OTHER; note = sugar modification: lna
gtgttcttgtacttc

SEQ ID NO: 952 - RNA, 15 nt, synthetic construct
  source 1..15: mol_type = other RNA; note = Antisense oligonucleotide
  modified_base 1: mod_base = OTHER; note = backbone modification: 5'-phosphorothioate; note = sugar modification: lna
  modified_base 2: mod_base = OTHER; note = sugar modification: lna; note = thymine; note = backbone modification: 5'-phosphorothioate
  modified_base 3: mod_base = OTHER; note = backbone modification: 5'-phosphorothioate; note = sugar modification: lna
  modified_base 4: mod_base = OTHER; note = sugar modification: 2'-O-methoxyethylribose; note = backbone modification: 5'-phosphorothioate; note = thymine
  modified_base 5: mod_base = OTHER; note = sugar modification: 2'-O-methoxyethylribose; note = thymine; note = backbone modification: 5'-phosphorothioate
  modified_base 6: mod_base = OTHER; mod_base = m5c; note = backbone modification: 5'-phosphorothioate; note = sugar modification: 2'-O-methoxyethylribose
  modified_base 7: mod_base = OTHER; note = thymine; note = sugar modification: 2'-O-methoxyethylribose; note = backbone modification: 5'-phosphorothioate
  modified_base 8: mod_base = OTHER; note = backbone modification: 5'-phosphorothioate; note = thymine; note = sugar modification: 2'-O-methoxyethylribose
  modified_base 9: mod_base = OTHER; note = backbone modification: 5'-phosphorothioate; note = sugar modification: 2'-O-methoxyethylribose
  modified_base 10: mod_base = OTHER; note = thymine; note = backbone modification: 5'-phosphorothioate; note = sugar modification: 2'-O-methoxyethylribose
  modified_base 11: mod_base = OTHER; note = sugar modification: 2'-O-methoxyethylribose; note = backbone modification: 5'-phosphorothioate
  modified_base 12: mod_base = OTHER; mod_base = m5c; note = sugar modification: 2'-O-methoxyethylribose; note = backbone modification: 5'-phosphorothioate
  modified_base 13: mod_base = OTHER; note = thymine; note = backbone modification: 5'-phosphorothioate; note = sugar modification: 2'-O-methoxyethylribose
  modified_base 14: mod_base = OTHER; note = backbone modification: 5'-phosphorothioate; note = thymine; note = sugar modification: lna
  modified_base 15: mod_base = OTHER; mod_base = m5c; note = sugar modification: lna
gtgttcttgtacttc

SEQ ID NO: 953 - RNA, 15 nt, synthetic construct
  source 1..15: mol_type = other RNA; note = Antisense oligonucleotide
  modified_base 1: mod_base = OTHER; note = sugar modification: lna; note = backbone modification: 5'-phosphorothioate
  modified_base 2: mod_base = OTHER; note = backbone modification: 5'-phosphorothioate; note = thymine; note = sugar modification: lna
  modified_base 3: mod_base = OTHER; note = backbone modification: 5'-phosphorothioate; note = sugar modification: lna
  modified_base 4: mod_base = OTHER; note = backbone modification: 5'-phosphorothioate; note = sugar modification: lna; note = thymine
  modified_base 5: mod_base = OTHER; note = thymine; note = sugar modification: 2'-O-methoxyethylribose; note = backbone modification: 5'-phosphorothioate
  modified_base 6: mod_base = m5c; mod_base = OTHER; note = backbone modification: 5'-phosphorothioate; note = sugar modification: 2'-O-methoxyethylribose
  modified_base 7: mod_base = OTHER; note = backbone modification: 5'-phosphorothioate; note = sugar modification: 2'-O-methoxyethylribose; note = thymine
  modified_base 8: mod_base = OTHER; note = sugar modification: 2'-O-methoxyethylribose; note = thymine; note = backbone modification: 5'-phosphorothioate
  modified_base 9: mod_base = OTHER; note = backbone modification: 5'-phosphorothioate; note = sugar modification: 2'-O-methoxyethylribose
  modified_base 10: mod_base = OTHER; note = thymine; note = backbone modification: 5'-phosphorothioate; note = sugar modification: 2'-O-methoxyethylribose
  modified_base 11: mod_base = OTHER; note = backbone modification: 5'-phosphorothioate; note = sugar modification: 2'-O-methoxyethylribose
  modified_base 12: mod_base = OTHER; mod_base = m5c; note = backbone modification: 5'-phosphorothioate; note = sugar modification: 2'-O-methoxyethylribose
  modified_base 13: mod_base = OTHER; note = backbone modification: 5'-phosphorothioate; note = thymine; note = sugar modification: 2'-O-methoxyethylribose
  modified_base 14: mod_base = OTHER; note = sugar modification: lna; note = thymine; note = backbone modification: 5'-phosphorothioate
  modified_base 15: mod_base = OTHER; mod_base = m5c; note = sugar modification: lna
gtgttcttgtacttc

SEQ ID NO: 954 - RNA, 15 nt, synthetic construct
  source 1..15: mol_type = other RNA; note = Antisense oligonucleotide
  modified_base 1: mod_base = OTHER; note = backbone modification: 5'-phosphorothioate; note = sugar modification: lna
  modified_base 2: mod_base = OTHER; note = thymine; note = backbone modification: 5'-phosphorothioate; note = sugar modification: 2'-O-methoxyethylribose
  modified_base 3: mod_base = OTHER; note = sugar modification: 2'-O-methoxyethylribose; note = backbone modification: 5'-phosphorothioate
  modified_base 4: mod_base = OTHER; note = sugar modification: 2'-O-methoxyethylribose; note = backbone modification: 5'-phosphorothioate; note = thymine
  modified_base 5: mod_base = OTHER; note = backbone modification: 5'-phosphorothioate; note = sugar modification: 2'-O-methoxyethylribose; note = thymine
  modified_base 6: mod_base = m5c; mod_base = OTHER; note = backbone modification: 5'-phosphorothioate; note = sugar modification: 2'-O-methoxyethylribose
  modified_base 7: mod_base = OTHER; note = thymine; note = sugar modification: 2'-O-methoxyethylribose; note = backbone modification: 5'-phosphorothioate
  modified_base 8: mod_base = OTHER; note = thymine; note = backbone modification: 5'-phosphorothioate; note = sugar modification: 2'-O-methoxyethylribose
  modified_base 9: mod_base = OTHER; note = backbone modification: 5'-phosphorothioate; note = sugar modification: 2'-O-methoxyethylribose
  modified_base 10: mod_base = OTHER; note = thymine; note = backbone modification: 5'-phosphorothioate; note = sugar modification: 2'-O-methoxyethylribose
  modified_base 11: mod_base = OTHER; note = backbone modification: 5'-phosphorothioate; note = sugar modification: 2'-O-methoxyethylribose
  modified_base 12: mod_base = m5c; mod_base = OTHER; note = backbone modification: 5'-phosphorothioate; note = sugar modification: 2'-O-methoxyethylribose
  modified_base 13: mod_base = OTHER; note = thymine; note = backbone modification: 5'-phosphorothioate; note = sugar modification: lna
  modified_base 14: mod_base = OTHER; note = backbone modification: 5'-phosphorothioate; note = thymine; note = sugar modification: lna
  modified_base 15: mod_base = OTHER; mod_base = m5c; note = sugar modification: lna
gtgttcttgtacttc

SEQ ID NO: 955 - RNA, 15 nt, synthetic construct
  source 1..15: mol_type = other RNA; note = Antisense oligonucleotide
  modified_base 1: mod_base = OTHER; note = backbone modification: 5'-phosphorothioate; note = sugar modification: lna
  modified_base 2: mod_base = OTHER; note = thymine; note = backbone modification: 5'-phosphorothioate; note = sugar modification: lna
  modified_base 3: mod_base = OTHER; note = sugar modification: 2'-O-methoxyethylribose; note = backbone modification: 5'-phosphorothioate
  modified_base 4: mod_base = OTHER; note = thymine; note = sugar modification: 2'-O-methoxyethylribose; note = backbone modification: 5'-phosphorothioate
  modified_base 5: mod_base = OTHER; note = sugar modification: 2'-O-methoxyethylribose; note = backbone modification: 5'-phosphorothioate; note = thymine
  modified_base 6: mod_base = m5c; mod_base = OTHER; note = sugar modification: 2'-O-methoxyethylribose; note = backbone modification: 5'-phosphorothioate
  modified_base 7: mod_base = OTHER; note = sugar modification: 2'-O-methoxyethylribose; note = backbone modification: 5'-phosphorothioate; note = thymine
  modified_base 8: mod_base = OTHER; note = sugar modification: 2'-O-methoxyethylribose; note = thymine; note = backbone modification: 5'-phosphorothioate
  modified_base 9: mod_base = OTHER; note = sugar modification: 2'-O-methoxyethylribose; note = backbone modification: 5'-phosphorothioate
  modified_base 10: mod_base = OTHER; note = sugar modification: 2'-O-methoxyethylribose; note = backbone modification: 5'-phosphorothioate; note = thymine
  modified_base 11: mod_base = OTHER; note = backbone modification: 5'-phosphorothioate; note = sugar modification: 2'-O-methoxyethylribose
  modified_base 12: mod_base = OTHER; mod_base = m5c; note = sugar modification: 2'-O-methoxyethylribose; note = backbone modification: 5'-phosphorothioate
  modified_base 13: mod_base = OTHER; note = sugar modification: lna; note = thymine; note = backbone modification: 5'-phosphorothioate
  modified_base 14: mod_base = OTHER; note = sugar modification: lna; note = thymine; note = backbone modification: 5'-phosphorothioate
  modified_base 15: mod_base = OTHER; mod_base = m5c; note = sugar modification: lna
gtgttcttgtacttc

SEQ ID NO: 956 - RNA, 15 nt, synthetic construct
  source 1..15: mol_type = other RNA; note = Antisense oligonucleotide
  modified_base 1: mod_base = OTHER; note = sugar modification: lna; note = backbone modification: 5'-phosphorothioate
  modified_base 2: mod_base = OTHER; note = backbone modification: 5'-phosphorothioate; note = thymine; note = sugar modification: lna
  modified_base 3: mod_base = OTHER; note = sugar modification: lna; note = backbone modification: 5'-phosphorothioate
  modified_base 4: mod_base = OTHER; note = sugar modification: lna; note = backbone modification: 5'-phosphorothioate; note = thymine
  modified_base 5: mod_base = OTHER; note = sugar modification: 2'-O-methoxyethylribose; note = backbone modification: 5'-phosphorothioate; note = thymine
  modified_base 6: mod_base = m5c; mod_base = OTHER; note = sugar modification: 2'-O-methoxyethylribose; note = backbone modification: 5'-phosphorothioate
  modified_base 7: mod_base = OTHER; note = backbone modification: 5'-phosphorothioate; note = thymine; note = sugar modification: 2'-O-methoxyethylribose
  modified_base 8: mod_base = OTHER; note = backbone modification: 5'-phosphorothioate; note = sugar modification: 2'-O-methoxyethylribose; note = thymine
  modified_base 9: mod_base = OTHER; note = sugar modification: 2'-O-methoxyethylribose; note = backbone modification: 5'-phosphorothioate
  modified_base 10: mod_base = OTHER; note = backbone modification: 5'-phosphorothioate; note = thymine; note = sugar modification: 2'-O-methoxyethylribose
  modified_base 11: mod_base = OTHER; note = backbone modification: 5'-phosphorothioate; note = sugar modification: 2'-O-methoxyethylribose
  modified_base 12: mod_base = m5c; mod_base = OTHER; note = backbone modification: 5'-phosphorothioate; note = sugar modification: 2'-O-methoxyethylribose
  modified_base 13: mod_base = OTHER; note = thymine; note = sugar modification: lna; note = backbone modification: 5'-phosphorothioate
  modified_base 14: mod_base = OTHER; note = backbone modification: 5'-phosphorothioate; note = sugar modification: lna; note = thymine
  modified_base 15: mod_base = m5c; mod_base = OTHER; note = sugar modification: lna
gtgttcttgtacttc

SEQ ID NO: 957 - RNA, 15 nt, synthetic construct
  source 1..15: mol_type = other RNA; note = Antisense oligonucleotide
  modified_base 1: mod_base = OTHER; note = sugar modification: lna; note = backbone modification: 5'-phosphorothioate
  modified_base 2: mod_base = OTHER; note = sugar modification: lna; note = thymine; note = backbone modification: 5'-phosphorothioate
  modified_base 3: mod_base = OTHER; note = sugar modification: 2'-O-methoxyethylribose; note = backbone modification: 5'-phosphorothioate
  modified_base 4: mod_base = OTHER; note = sugar modification: 2'-O-methoxyethylribose; note = backbone modification: 5'-phosphorothioate; note = thymine
  modified_base 5: mod_base = OTHER; note = backbone modification: 5'-phosphorothioate; note = sugar modification: 2'-O-methoxyethylribose; note = thymine
  modified_base 6: mod_base = m5c; mod_base = OTHER; note = backbone modification: 5'-phosphorothioate; note = sugar modification: 2'-O-methoxyethylribose
  modified_base 7: mod_base = OTHER; note = backbone modification: 5'-phosphorothioate; note = thymine; note = sugar modification: 2'-O-methoxyethylribose
  modified_base 8: mod_base = OTHER; note = thymine; note = sugar modification: 2'-O-methoxyethylribose; note = backbone modification: 5'-phosphorothioate
  modified_base 9: mod_base = OTHER; note = sugar modification: 2'-O-methoxyethylribose; note = backbone modification: 5'-phosphorothioate
  modified_base 10: mod_base = OTHER; note = sugar modification: 2'-O-methoxyethylribose; note = thymine; note = backbone modification: 5'-phosphorothioate
  modified_base 11: mod_base = OTHER; note = sugar modification: 2'-O-methoxyethylribose; note = backbone modification: 5'-phosphorothioate
  modified_base 12: mod_base = m5c; mod_base = OTHER; note = sugar modification: lna; note = backbone modification: 5'-phosphorothioate
  modified_base 13: mod_base = OTHER; note = backbone modification: 5'-phosphorothioate; note = sugar modification: lna; note = thymine
  modified_base 14: mod_base = OTHER; note = sugar modification: lna; note = backbone modification: 5'-phosphorothioate; note = thymine
  modified_base 15: mod_base = OTHER; mod_base = m5c; note = sugar modification: lna
gtgttcttgtacttc

SEQ ID NO: 958 - RNA, 15 nt, synthetic construct
  source 1..15: mol_type = other RNA; note = Antisense oligonucleotide
  modified_base 1: mod_base = OTHER; note = backbone modification: 5'-phosphorothioate; note = sugar modification: lna
  modified_base 2: mod_base = OTHER; note = backbone modification: 5'-phosphorothioate; note = thymine; note = sugar modification: lna
  modified_base 3: mod_base = OTHER; note = sugar modification: lna; note = backbone modification: 5'-phosphorothioate
  modified_base 4: mod_base = OTHER; note = backbone modification: 5'-phosphorothioate; note = sugar modification: 2'-O-methoxyethylribose; note = thymine
  modified_base 5: mod_base = OTHER; note = sugar modification: 2'-O-methoxyethylribose; note = thymine; note = backbone modification: 5'-phosphorothioate
  modified_base 6: mod_base = OTHER; mod_base = m5c; note = sugar modification: 2'-O-methoxyethylribose; note = backbone modification: 5'-phosphorothioate
  modified_base 7: mod_base = OTHER; note = backbone modification: 5'-phosphorothioate; note = sugar modification: 2'-O-methoxyethylribose; note = thymine
  modified_base 8: mod_base = OTHER; note = sugar modification: 2'-O-methoxyethylribose; note = backbone modification: 5'-phosphorothioate; note = thymine
  modified_base 9: mod_base = OTHER; note = sugar modification: 2'-O-methoxyethylribose; note = backbone modification: 5'-phosphorothioate
  modified_base 10: mod_base = OTHER; note = thymine; note = sugar modification: 2'-O-methoxyethylribose; note = backbone modification: 5'-phosphorothioate
  modified_base 11: mod_base = OTHER; note = backbone modification: 5'-phosphorothioate; note = sugar modification: 2'-O-methoxyethylribose
  modified_base 12: mod_base = OTHER; mod_base = m5c; note = sugar modification: lna; note = backbone modification: 5'-phosphorothioate
  modified_base 13: mod_base = OTHER; note = backbone modification: 5'-phosphorothioate; note = thymine; note = sugar modification: lna
  modified_base 14: mod_base = OTHER; note = sugar modification: lna; note = backbone modification: 5'-phosphorothioate; note = thymine
  modified_base 15: mod_base = m5c; mod_base = OTHER; note = sugar modification: lna
gtgttcttgtacttc

SEQ ID NO: 959 - RNA, 15 nt, synthetic construct
  source 1..15: mol_type = other RNA; note = Antisense oligonucleotide
  modified_base 1: mod_base = OTHER; note = backbone modification: 5'-phosphorothioate; note = sugar modification: lna
  modified_base 2: mod_base = OTHER; note = backbone modification: 5'-phosphorothioate; note = sugar modification: lna; note = thymine
  modified_base 3: mod_base = OTHER; note = backbone modification: 5'-phosphorothioate; note = sugar modification: lna
  modified_base 4: mod_base = OTHER; note = backbone modification: 5'-phosphorothioate; note = sugar modification: lna; note = thymine
  modified_base 5: mod_base = OTHER; note = thymine; note = sugar modification: 2'-O-methoxyethylribose; note = backbone modification: 5'-phosphorothioate
  modified_base 6: mod_base = OTHER; mod_base = m5c; note = backbone modification: 5'-phosphorothioate; note = sugar modification: 2'-O-methoxyethylribose
  modified_base 7: mod_base = OTHER; note = backbone modification: 5'-phosphorothioate; note = sugar modification: 2'-O-methoxyethylribose; note = thymine
  modified_base 8: mod_base = OTHER; note = backbone modification: 5'-phosphorothioate; note = sugar modification: 2'-O-methoxyethylribose; note = thymine
  modified_base 9: mod_base = OTHER; note = sugar modification: 2'-O-methoxyethylribose; note = backbone modification: 5'-phosphorothioate
  modified_base 10: mod_base = OTHER; note = thymine; note = sugar modification: 2'-O-methoxyethylribose; note = backbone modification: 5'-phosphorothioate
  modified_base 11: mod_base = OTHER; note = sugar modification: 2'-O-methoxyethylribose; note = backbone modification: 5'-phosphorothioate
  modified_base 12: mod_base = OTHER; mod_base = m5c; note = sugar modification: lna; note = backbone modification: 5'-phosphorothioate
  modified_base 13: mod_base = OTHER; note = thymine; note = backbone modification: 5'-phosphorothioate; note = sugar modification: lna
  modified_base 14: mod_base = OTHER; note = backbone modification: 5'-phosphorothioate; note = thymine; note = sugar modification: lna
  modified_base 15: mod_base = OTHER; mod_base = m5c; note = sugar modification: lna
gtgttcttgtacttc

SEQ ID NO: 960 - RNA, 15 nt, synthetic construct
  source 1..15: mol_type = other RNA; note = Antisense oligonucleotide
  modified_base 1: mod_base = OTHER; note = backbone modification: 5'-phosphorothioate; note = sugar modification: lna
  modified_base 2: mod_base = OTHER; note = sugar modification: lna; note = thymine; note = backbone modification: 5'-phosphorothioate
  modified_base 3: mod_base = OTHER; note = backbone modification: 5'-phosphorothioate; note = sugar modification: lna
  modified_base 4: mod_base = OTHER; note = sugar modification: lna; note = backbone modification: 5'-phosphorothioate; note = thymine
  modified_base 5: mod_base = OTHER; note = backbone modification: 5'-phosphorothioate; note = thymine; note = sugar modification: lna
  modified_base 6: mod_base = m5c; mod_base = OTHER; note = backbone modification: 5'-phosphorothioate; note = sugar modification: 2'-O-methoxyethylribose
  modified_base 7: mod_base = OTHER; note = sugar modification: 2'-O-methoxyethylribose; note = backbone modification: 5'-phosphorothioate; note = thymine
  modified_base 8: mod_base = OTHER; note = thymine; note = backbone modification: 5'-phosphorothioate; note = sugar modification: 2'-O-methoxyethylribose
  modified_base 9: mod_base = OTHER; note = sugar modification: 2'-O-methoxyethylribose; note = backbone modification: 5'-phosphorothioate
  modified_base 10: mod_base = OTHER; note = backbone modification: 5'-phosphorothioate; note = thymine; note = sugar modification: 2'-O-methoxyethylribose
  modified_base 11: mod_base = OTHER; note = backbone modification: 5'-phosphorothioate; note = sugar modification: lna
  modified_base 12: mod_base = OTHER; mod_base = m5c; note = sugar modification: lna; note = backbone modification: 5'-phosphorothioate
  modified_base 13: mod_base = OTHER; note = sugar modification: lna; note = thymine; note = backbone modification: 5'-phosphorothioate
  modified_base 14: mod_base = OTHER; note = thymine; note = backbone modification: 5'-phosphorothioate; note = sugar modification: lna
  modified_base 15: mod_base = m5c; mod_base = OTHER; note = sugar modification: lna
gtgttcttgtacttc

SEQ ID NO: 961 - RNA, 15 nt, synthetic construct
  source 1..15: mol_type = other RNA; note = Antisense oligonucleotide
  modified_base 1: mod_base = OTHER; note = sugar modification: 2'-O-methoxyethylribose; note = backbone modification: 5'-phosphorothioate
  modified_base 2: mod_base = OTHER; note = sugar modification: 2'-O-methoxyethylribose; note = thymine; note = backbone modification: 5'-phosphorothioate
  modified_base 3: mod_base = OTHER; note = backbone modification: 5'-phosphorothioate; note = sugar modification: 2'-O-methoxyethylribose
  modified_base 4: mod_base = OTHER; note = thymine; note = backbone modification: 5'-phosphorothioate; note = sugar modification: 2'-O-methoxyethylribose
  modified_base 5: mod_base = OTHER; note = sugar modification: 2'-O-methoxyethylribose; note = backbone modification: 5'-phosphorothioate; note = thymine
  modified_base 6: mod_base = OTHER; mod_base = m5c; note = sugar modification: 2'-O-methoxyethylribose; note = backbone modification: 5'-phosphorothioate
  modified_base 7: mod_base = OTHER; note = sugar modification: 2'-O-methoxyethylribose; note = thymine; note = backbone modification: 5'-phosphorothioate
  modified_base 8: mod_base = OTHER; note = sugar modification: 2'-O-methoxyethylribose; note = thymine; note = backbone modification: 5'-phosphorothioate
  modified_base 9: mod_base = OTHER; note = sugar modification: 2'-O-methoxyethylribose; note = backbone modification: 5'-phosphorothioate
  modified_base 10: mod_base = OTHER; note = sugar modification: 2'-O-methoxyethylribose; note = backbone modification: 5'-phosphorothioate; note = thymine
  modified_base 11: mod_base = OTHER; note = sugar modification: 2'-O-methoxyethylribose; note = backbone modification: 5'-phosphorothioate
  modified_base 12: mod_base = OTHER; mod_base = m5c; note = sugar modification: 2'-O-methoxyethylribose; note = backbone modification: 5'-phosphorothioate
  modified_base 13: mod_base = OTHER; note = thymine; note = backbone modification: 5'-phosphorothioate; note = sugar modification: 2'-O-methoxyethylribose
  modified_base 14: mod_base = OTHER; note = sugar modification: 2'-O-methoxyethylribose; note = thymine; note = backbone modification: 5'-phosphorothioate
  modified_base 15: mod_base = m5c; mod_base = OTHER; note = sugar modification: lna
gtgttcttgtacttc

SEQ ID NO: 962 - RNA, 15 nt, synthetic construct
  source 1..15: mol_type = other RNA; note = Antisense oligonucleotide
  modified_base 1: mod_base = OTHER; note = sugar modification: 2'-O-methoxyethylribose; note = backbone modification: 5'-phosphorothioate
  modified_base 2: mod_base = OTHER; note = sugar modification: 2'-O-methoxyethylribose; note = backbone modification: 5'-phosphorothioate; note = thymine
  modified_base 3: mod_base = OTHER; note = sugar modification: 2'-O-methoxyethylribose; note = backbone modification: 5'-phosphorothioate
  modified_base 4: mod_base = OTHER; note = backbone modification: 5'-phosphorothioate; note = sugar modification: 2'-O-methoxyethylribose; note = thymine
  modified_base 5: mod_base = OTHER; note = sugar modification: 2'-O-methoxyethylribose; note = thymine; note = backbone modification: 5'-phosphorothioate
  modified_base 6: mod_base = m5c; mod_base = OTHER; note = sugar modification: 2'-O-methoxyethylribose; note = backbone modification: 5'-phosphorothioate
  modified_base 7: mod_base = OTHER; note = thymine; note = sugar modification: 2'-O-methoxyethylribose; note = backbone modification: 5'-phosphorothioate
  modified_base 8: mod_base = OTHER; note = thymine; note = backbone modification: 5'-phosphorothioate; note = sugar modification: 2'-O-methoxyethylribose
  modified_base 9: mod_base = OTHER; note = sugar modification: 2'-O-methoxyethylribose; note = backbone modification: 5'-phosphorothioate
  modified_base 10: mod_base = OTHER; note = sugar modification: 2'-O-methoxyethylribose; note = thymine; note = backbone modification: 5'-phosphorothioate
  modified_base 11: mod_base = OTHER; note = backbone modification: 5'-phosphorothioate; note = sugar modification: 2'-O-methoxyethylribose
  modified_base 12: mod_base = OTHER; mod_base = m5c; note = sugar modification: 2'-O-methoxyethylribose; note = backbone modification: 5'-phosphorothioate
  modified_base 13: mod_base = OTHER; note = backbone modification: 5'-phosphorothioate; note = thymine; note = sugar modification: lna
  modified_base 14: mod_base = OTHER; note = sugar modification: lna; note = thymine; note = backbone modification: 5'-phosphorothioate
  modified_base 15: mod_base = m5c; mod_base = OTHER; note = sugar modification: lna
gtgttcttgtacttc

SEQ ID NO: 963 - RNA, 16 nt, synthetic construct
  source 1..16: mol_type = other RNA; note = Antisense oligonucleotide
  modified_base 1: mod_base = OTHER; note = thymine; note = backbone modification: 5'-phosphorothioate; note = sugar modification: lna
  modified_base 2: mod_base = OTHER; mod_base = m5c; note = sugar modification: 2'-O-methoxyethylribose; note = backbone modification: 5'-phosphorothioate
  modified_base 3: mod_base = OTHER; note = thymine; note = sugar modification: 2'-O-methoxyethylribose; note = backbone modification: 5'-phosphorothioate
  modified_base 4: mod_base = OTHER; note = thymine; note = sugar modification: 2'-O-methoxyethylribose; note = backbone modification: 5'-phosphorothioate
  modified_base 5: mod_base = OTHER; note = sugar modification: 2'-O-methoxyethylribose; note = backbone modification: 5'-phosphorothioate
  modified_base 6: mod_base = OTHER; note = thymine; note = backbone modification: 5'-phosphorothioate; note = sugar modification: 2'-O-methoxyethylribose
  modified_base 7: mod_base = OTHER; note = sugar modification: 2'-O-methoxyethylribose; note = backbone modification: 5'-phosphorothioate
  modified_base 8: mod_base = m5c; mod_base = OTHER; note = backbone modification: 5'-phosphorothioate; note = sugar modification: 2'-O-methoxyethylribose
  modified_base 9: mod_base = OTHER; note = backbone modification: 5'-phosphorothioate; note = sugar modification: 2'-O-methoxyethylribose; note = thymine
  modified_base 10: mod_base = OTHER; note = backbone modification: 5'-phosphorothioate; note = thymine; note = sugar modification: 2'-O-methoxyethylribose
  modified_base 11: mod_base = OTHER; mod_base = m5c; note = backbone modification: 5'-phosphorothioate; note = sugar modification: 2'-O-methoxyethylribose
  modified_base 12: mod_base = OTHER; note = sugar modification: 2'-O-methoxyethylribose; note = backbone modification: 5'-phosphorothioate
  modified_base 13: mod_base = OTHER; note = backbone modification: 5'-phosphorothioate; note = sugar modification: 2'-O-methoxyethylribose; note = thymine
  modified_base 14: mod_base = OTHER; mod_base = m5c; note = backbone modification: 5'-phosphorothioate; note = sugar modification: 2'-O-methoxyethylribose
  modified_base 15: mod_base = OTHER; mod_base = m5c; note = sugar modification: 2'-O-methoxyethylribose; note = backbone modification: 5'-phosphorothioate
  modified_base 16: mod_base = m5c; mod_base = OTHER; note = sugar modification: 2'-O-methoxyethylribose
tcttgtacttcatccc

SEQ ID NO: 964 - RNA, 16 nt, synthetic construct
  source 1..16: mol_type = other RNA; note = Antisense oligonucleotide
  modified_base 1: mod_base = OTHER; note = backbone modification: 5'-phosphorothioate; note = thymine; note = sugar modification: lna
  modified_base 2: mod_base = m5c; mod_base = OTHER; note = sugar modification: lna; note = backbone modification: 5'-phosphorothioate
  modified_base 3: mod_base = OTHER; note = sugar modification: 2'-O-methoxyethylribose; note = backbone modification: 5'-phosphorothioate; note = thymine
  modified_base 4: mod_base = OTHER; note = backbone modification: 5'-phosphorothioate; note = thymine; note = sugar modification: 2'-O-methoxyethylribose
  modified_base 5: mod_base = OTHER; note = backbone modification: 5'-phosphorothioate; note = sugar modification: 2'-O-methoxyethylribose
  modified_base 6: mod_base = OTHER; note = thymine; note = backbone modification: 5'-phosphorothioate; note = sugar modification: 2'-O-methoxyethylribose
  modified_base 7: mod_base = OTHER; note = sugar modification: 2'-O-methoxyethylribose; note = backbone modification: 5'-phosphorothioate
  modified_base 8: mod_base = m5c; mod_base = OTHER; note = sugar modification: 2'-O-methoxyethylribose; note = backbone modification: 5'-phosphorothioate
  modified_base 9: mod_base = OTHER; note = sugar modification: 2'-O-methoxyethylribose; note = thymine; note = backbone modification: 5'-phosphorothioate
  modified_base 10: mod_base = OTHER; note = sugar modification: 2'-O-methoxyethylribose; note = thymine; note = backbone modification: 5'-phosphorothioate
  modified_base 11: mod_base = OTHER; mod_base = m5c; note = sugar modification: 2'-O-methoxyethylribose; note = backbone modification: 5'-phosphorothioate
  modified_base 12: mod_base = OTHER; note = backbone modification: 5'-phosphorothioate; note = sugar modification: 2'-O-methoxyethylribose
  modified_base 13: mod_base = OTHER; note = backbone modification: 5'-phosphorothioate; note = sugar modification: 2'-O-methoxyethylribose; note = thymine
  modified_base 14: mod_base = m5c; mod_base = OTHER; note = sugar modification: 2'-O-methoxyethylribose; note = backbone modification: 5'-phosphorothioate
  modified_base 15: mod_base = OTHER; mod_base = m5c; note = backbone modification: 5'-phosphorothioate; note = sugar modification: 2'-O-methoxyethylribose
  modified_base 16: mod_base = m5c; mod_base = OTHER; note = sugar modification: 2'-O-methoxyethylribose
tcttgtacttcatccc

SEQ ID NO: 965 - RNA, 16 nt, synthetic construct
  source 1..16: mol_type = other RNA; note = Antisense oligonucleotide
  modified_base 1: mod_base = OTHER; note = backbone modification: 5'-phosphorothioate; note = sugar modification: lna; note = thymine
  modified_base 2: mod_base = OTHER; mod_base = m5c; note = sugar modification: lna; note = backbone modification: 5'-phosphorothioate
  modified_base 3: mod_base = OTHER; note = sugar modification: lna; note = thymine; note = backbone modification: 5'-phosphorothioate
  modified_base 4: mod_base = OTHER; note = backbone modification: 5'-phosphorothioate; note = sugar modification: 2'-O-methoxyethylribose; note = thymine
  modified_base 5: mod_base = OTHER; note = backbone modification: 5'-phosphorothioate; note = sugar modification: 2'-O-methoxyethylribose
  modified_base 6: mod_base = OTHER; note = thymine; note = sugar modification: 2'-O-methoxyethylribose; note = backbone modification: 5'-phosphorothioate
  modified_base 7: mod_base = OTHER; note = backbone modification: 5'-phosphorothioate; note = sugar modification: 2'-O-methoxyethylribose
  modified_base 8: mod_base = m5c; mod_base = OTHER; note = backbone modification: 5'-phosphorothioate; note = sugar modification: 2'-O-methoxyethylribose
  modified_base 9: mod_base = OTHER; note = sugar modification: 2'-O-methoxyethylribose; note = thymine; note = backbone modification: 5'-phosphorothioate
  modified_base 10: mod_base = OTHER; note = backbone modification: 5'-phosphorothioate; note = sugar modification: 2'-O-methoxyethylribose; note = thymine
  modified_base 11: mod_base = m5c; mod_base = OTHER; note = backbone modification: 5'-phosphorothioate; note = sugar modification: 2'-O-methoxyethylribose
  modified_base 12: mod_base = OTHER; note = backbone modification: 5'-phosphorothioate; note = sugar modification: 2'-O-methoxyethylribose
  modified_base 13: mod_base = OTHER; note = thymine; note = backbone modification: 5'-phosphorothioate; note = sugar modification: 2'-O-methoxyethylribose
  modified_base 14: mod_base = m5c; mod_base = OTHER; note = sugar modification: 2'-O-methoxyethylribose; note = backbone modification: 5'-phosphorothioate
  modified_base 15: mod_base = m5c; mod_base = OTHER; note = backbone modification: 5'-phosphorothioate; note = sugar modification: 2'-O-methoxyethylribose
  modified_base 16: mod_base = m5c; mod_base = OTHER; note = sugar modification: 2'-O-methoxyethylribose
tcttgtacttcatccc

SEQ ID NO: 966 - RNA, 16 nt, synthetic construct
  source 1..16: mol_type = other RNA; note = Antisense oligonucleotide
  modified_base 1: mod_base = OTHER; note = thymine; note = sugar modification: lna; note = backbone modification: 5'-phosphorothioate
  modified_base 2: mod_base = OTHER; mod_base = m5c; note = backbone modification: 5'-phosphorothioate; note = sugar modification: 2'-O-methoxyethylribose
  modified_base 3: mod_base = OTHER; note = backbone modification: 5'-phosphorothioate; note = sugar modification: 2'-O-methoxyethylribose; note = thymine
  modified_base 4: mod_base = OTHER; note = backbone modification: 5'-phosphorothioate; note = thymine; note = sugar modification: 2'-O-methoxyethylribose
  modified_base 5: mod_base = OTHER; note = sugar modification: 2'-O-methoxyethylribose; note = backbone modification: 5'-phosphorothioate
  modified_base 6: mod_base = OTHER; note = sugar modification: 2'-O-methoxyethylribose; note = backbone modification: 5'-phosphorothioate; note = thymine
  modified_base 7: mod_base = OTHER; note = backbone modification: 5'-phosphorothioate; note = sugar modification: 2'-O-methoxyethylribose
  modified_base 8: mod_base = OTHER; mod_base = m5c; note = backbone modification: 5'-phosphorothioate; note = sugar modification: 2'-O-methoxyethylribose
  modified_base 9: mod_base = OTHER; note = sugar modification: 2'-O-methoxyethylribose; note = thymine; note = backbone modification: 5'-phosphorothioate
  modified_base 10: mod_base = OTHER; note = sugar modification: 2'-O-methoxyethylribose; note = thymine; note = backbone modification: 5'-phosphorothioate
  modified_base 11: mod_base = m5c; mod_base = OTHER; note = sugar modification: 2'-O-methoxyethylribose; note = backbone modification: 5'-phosphorothioate
  modified_base 12: mod_base = OTHER; note = sugar modification: 2'-O-methoxyethylribose; note = backbone modification: 5'-phosphorothioate
  modified_base 13: mod_base = OTHER; note = sugar modification: 2'-O-methoxyethylribose; note = backbone modification: 5'-phosphorothioate; note = thymine
  modified_base 14: mod_base = m5c; mod_base = OTHER; note = backbone modification: 5'-phosphorothioate; note = sugar modification: 2'-O-methoxyethylribose
  modified_base 15: mod_base = OTHER; mod_base = m5c; note = sugar modification: 2'-O-methoxyethylribose; note = backbone modification: 5'-phosphorothioate
  modified_base 16: mod_base = m5c; mod_base = OTHER; note = sugar modification: lna
tcttgtacttcatccc

SEQ ID NO: 967 - RNA, 16 nt, synthetic construct
  source 1..16: mol_type = other RNA; note = Antisense oligonucleotide
  modified_base 1: mod_base = OTHER; note = thymine; note = sugar modification: lna; note = backbone modification: 5'-phosphorothioate
  modified_base 2: mod_base = OTHER; mod_base = m5c; note = sugar modification: lna; note = backbone modification: 5'-phosphorothioate
  modified_base 3: mod_base = OTHER; note = sugar modification: 2'-O-methoxyethylribose; note = thymine; note = backbone modification: 5'-phosphorothioate
  modified_base 4: mod_base = OTHER; note = sugar modification: 2'-O-methoxyethylribose; note = thymine; note = backbone modification: 5'-phosphorothioate
  modified_base 5: mod_base = OTHER; note = sugar modification: 2'-O-methoxyethylribose; note = backbone modification: 5'-phosphorothioate
  modified_base 6: mod_base = OTHER; note = backbone modification: 5'-phosphorothioate; note = sugar modification: 2'-O-methoxyethylribose; note = thymine
  modified_base 7: mod_base = OTHER; note = sugar modification: 2'-O-methoxyethylribose; note = backbone modification: 5'-phosphorothioate
  modified_base 8: mod_base = m5c; mod_base = OTHER; note = backbone modification: 5'-phosphorothioate; note = sugar modification: 2'-O-methoxyethylribose
  modified_base 9: mod_base = OTHER; note = sugar modification: 2'-O-methoxyethylribose; note = thymine; note = backbone modification: 5'-phosphorothioate
  modified_base 10: mod_base = OTHER; note = backbone modification: 5'-phosphorothioate; note = sugar modification: 2'-O-methoxyethylribose; note = thymine
  modified_base 11: mod_base = m5c; mod_base = OTHER; note = sugar modification: 2'-O-methoxyethylribose; note = backbone modification: 5'-phosphorothioate
  modified_base 12: mod_base = OTHER; note = backbone modification: 5'-phosphorothioate; note = sugar modification: 2'-O-methoxyethylribose
  modified_base 13: mod_base = OTHER; note = backbone modification: 5'-phosphorothioate; note = thymine; note = sugar modification: 2'-O-methoxyethylribose
  modified_base 14: mod_base = OTHER; mod_base = m5c; note = backbone modification: 5'-phosphorothioate; note = sugar modification: 2'-O-methoxyethylribose
  modified_base 15: mod_base = OTHER; mod_base = m5c; note = sugar modification: 2'-O-methoxyethylribose; note = backbone modification: 5'-phosphorothioate
  modified_base 16: mod_base = OTHER; mod_base = m5c; note = sugar modification: lna
tcttgtacttcatccc

SEQ ID NO: 968 - RNA, 16 nt, synthetic construct
  source 1..16: mol_type = other RNA; note = Antisense oligonucleotide
  modified_base 1: mod_base = OTHER; note = thymine; note = backbone modification: 5'-phosphorothioate; note = sugar modification: lna
  modified_base 2: mod_base = OTHER; mod_base = m5c; note = sugar modification: lna; note = backbone modification: 5'-phosphorothioate
  modified_base 3: mod_base = OTHER; note = sugar modification: lna; note = thymine; note = backbone modification: 5'-phosphorothioate
  modified_base 4: mod_base = OTHER; note = thymine; note = sugar modification: 2'-O-methoxyethylribose; note = backbone modification: 5'-phosphorothioate
  modified_base 5: mod_base = OTHER; note = backbone modification: 5'-phosphorothioate; note = sugar modification: 2'-O-methoxyethylribose
  modified_base 6: mod_base = OTHER; note = sugar modification: 2'-O-methoxyethylribose; note = thymine; note = backbone modification: 5'-phosphorothioate
  modified_base 7: mod_base = OTHER; note = backbone modification: 5'-phosphorothioate; note = sugar modification: 2'-O-methoxyethylribose
  modified_base 8: mod_base = OTHER; mod_base = m5c; note = backbone modification: 5'-phosphorothioate; note = sugar modification: 2'-O-methoxyethylribose
  modified_base 9: mod_base = OTHER; note = sugar modification: 2'-O-methoxyethylribose; note = backbone modification: 5'-phosphorothioate; note = thymine
  modified_base 10: mod_base = OTHER; note = backbone modification: 5'-phosphorothioate; note = sugar modification: 2'-O-methoxyethylribose; note = thymine
  modified_base 11: mod_base = OTHER; mod_base = m5c; note = sugar modification: 2'-O-methoxyethylribose; note = backbone modification: 5'-phosphorothioate
  modified_base 12: mod_base = OTHER; note = sugar modification: 2'-O-methoxyethylribose; note = backbone modification: 5'-phosphorothioate
  modified_base 13: mod_base = OTHER; note = sugar modification: 2'-O-methoxyethylribose; note = thymine; note = backbone modification: 5'-phosphorothioate
  modified_base 14: mod_base = m5c; mod_base = OTHER; note = sugar modification: 2'-O-methoxyethylribose; note = backbone modification: 5'-phosphorothioate
  modified_base 15: mod_base = OTHER; mod_base = m5c; note = sugar modification: 2'-O-methoxyethylribose; note = backbone modification: 5'-phosphorothioate
  modified_base 16: mod_base = OTHER; mod_base = m5c; note = sugar modification: lna
tcttgtacttcatccc

SEQ ID NO: 969 - RNA, 16 nt, synthetic construct
  source 1..16: mol_type = other RNA; note = Antisense oligonucleotide
  modified_base 1: mod_base = OTHER; note = sugar modification: lna; note = backbone modification: 5'-phosphorothioate; note = thymine
  modified_base 2: mod_base = OTHER; mod_base = m5c; note = sugar modification: 2'-O-methoxyethylribose; note = backbone modification: 5'-phosphorothioate
  modified_base 3: mod_base = OTHER; note = sugar modification: 2'-O-methoxyethylribose; note = thymine; note = backbone modification: 5'-phosphorothioate
  modified_base 4: mod_base = OTHER; note = thymine; note = sugar modification: 2'-O-methoxyethylribose; note = backbone modification: 5'-phosphorothioate
  modified_base 5: mod_base = OTHER; note = sugar modification: 2'-O-methoxyethylribose; note = backbone modification: 5'-phosphorothioate
  modified_base 6: mod_base = OTHER; note = thymine; note = sugar modification: 2'-O-methoxyethylribose; note = backbone modification: 5'-phosphorothioate
  modified_base 7: mod_base = OTHER; note = backbone modification: 5'-phosphorothioate; note = sugar modification: 2'-O-methoxyethylribose
  modified_base 8: mod_base = OTHER; mod_base = m5c; note = backbone modification: 5'-phosphorothioate; note = sugar modification: 2'-O-methoxyethylribose
  modified_base 9: mod_base = OTHER; note = sugar modification: 2'-O-methoxyethylribose; note = thymine; note = backbone modification: 5'-phosphorothioate
  modified_base 10: mod_base = OTHER; note = backbone modification: 5'-phosphorothioate; note = sugar modification: 2'-O-methoxyethylribose; note = thymine
  modified_base 11: mod_base = OTHER; mod_base = m5c; note = sugar modification: 2'-O-methoxyethylribose; note = backbone modification: 5'-phosphorothioate
  modified_base 12: mod_base = OTHER; note = sugar modification: 2'-O-methoxyethylribose; note = backbone modification: 5'-phosphorothioate
  modified_base 13: mod_base = OTHER; note = sugar modification: 2'-O-methoxyethylribose; note = thymine; note = backbone modification: 5'-phosphorothioate
  modified_base 14: mod_base = OTHER; mod_base = m5c; note = backbone modification: 5'-phosphorothioate; note = sugar modification: 2'-O-methoxyethylribose
  modified_base 15: mod_base = m5c; mod_base = OTHER; note = backbone modification: 5'-phosphorothioate; note = sugar modification: lna
  modified_base 16: mod_base = OTHER; mod_base = m5c; note = sugar modification: lna
tcttgtacttcatccc

SEQ ID NO: 970 - RNA, 16 nt, synthetic construct
  source 1..16: mol_type = other RNA; note = Antisense oligonucleotide
  modified_base 1: mod_base = OTHER; note = thymine; note = backbone modification: 5'-phosphorothioate; note = sugar modification: lna
  modified_base 2: mod_base = OTHER; mod_base = m5c; note = backbone modification: 5'-phosphorothioate; note = sugar modification: lna
  modified_base 3: mod_base = OTHER; note = thymine; note = sugar modification: 2'-O-methoxyethylribose; note = backbone modification: 5'-phosphorothioate
  modified_base 4: mod_base = OTHER; note = thymine; note = backbone modification: 5'-phosphorothioate; note = sugar modification: 2'-O-methoxyethylribose
  modified_base 5: mod_base = OTHER; note = sugar modification: 2'-O-methoxyethylribose; note = backbone modification: 5'-phosphorothioate
  modified_base 6: mod_base = OTHER; note = backbone modification: 5'-phosphorothioate; note = sugar modification: 2'-O-methoxyethylribose; note = thymine
  modified_base 7: mod_base = OTHER; note = sugar modification: 2'-O-methoxyethylribose; note = backbone modification: 5'-phosphorothioate
  modified_base 8: mod_base = OTHER; mod_base = m5c; note = backbone modification: 5'-phosphorothioate; note = sugar modification: 2'-O-methoxyethylribose
  modified_base 9: mod_base = OTHER; note = sugar modification: 2'-O-methoxyethylribose; note = thymine; note = backbone modification: 5'-phosphorothioate
  modified_base 10: mod_base = OTHER; note = thymine; note = backbone modification: 5'-phosphorothioate; note = sugar modification: 2'-O-methoxyethylribose
  modified_base 11: mod_base = OTHER; mod_base = m5c; note = sugar modification: 2'-O-methoxyethylribose; note = backbone modification: 5'-phosphorothioate
  modified_base 12: mod_base = OTHER; note = sugar modification: 2'-O-methoxyethylribose; note = backbone modification: 5'-phosphorothioate
  modified_base 13: mod_base = OTHER; note = thymine; note = sugar modification: 2'-O-methoxyethylribose; note = backbone modification: 5'-phosphorothioate
  modified_base 14: mod_base = OTHER; mod_base = m5c; note = sugar modification: 2'-O-methoxyethylribose; note = backbone modification: 5'-phosphorothioate
  modified_base 15: mod_base = OTHER; mod_base = m5c; note = sugar modification: lna; note = backbone modification: 5'-phosphorothioate
  modified_base 16: mod_base = m5c; mod_base = OTHER; note = sugar modification: lna
tcttgtacttcatccc

SEQ ID NO: 971 - RNA, 16 nt, synthetic construct
  source 1..16: mol_type = other RNA; note = Antisense oligonucleotide
  modified_base 1: mod_base = OTHER; note = thymine; note = backbone modification: 5'-phosphorothioate; note = sugar modification: lna
  modified_base 2: mod_base = OTHER; mod_base = m5c; note = sugar modification: lna; note = backbone modification: 5'-phosphorothioate
  modified_base 3: mod_base = OTHER; note = thymine; note = backbone modification: 5'-phosphorothioate; note = sugar modification: lna
  modified_base 4: mod_base = OTHER; note = backbone modification: 5'-phosphorothioate; note = sugar modification: 2'-O-methoxyethylribose; note = thymine
  modified_base 5: mod_base = OTHER; note = backbone modification: 5'-phosphorothioate; note = sugar modification: 2'-O-methoxyethylribose
  modified_base 6: mod_base = OTHER; note = thymine; note = backbone modification: 5'-phosphorothioate; note = sugar modification: 2'-O-methoxyethylribose
  modified_base 7: mod_base = OTHER; note = sugar modification: 2'-O-methoxyethylribose; note = backbone modification: 5'-phosphorothioate
  modified_base 8: mod_base = OTHER; mod_base = m5c; note = sugar modification: 2'-O-methoxyethylribose; note = backbone modification: 5'-phosphorothioate
  modified_base 9: mod_base = OTHER; note = thymine; note = sugar modification: 2'-O-methoxyethylribose; note = backbone modification: 5'-phosphorothioate
  modified_base 10: mod_base = OTHER; note = backbone modification: 5'-phosphorothioate; note = sugar modification: 2'-O-methoxyethylribose; note = thymine
  modified_base 11: mod_base = OTHER; mod_base = m5c; note = backbone modification: 5'-phosphorothioate; note = sugar modification: 2'-O-methoxyethylribose
  modified_base 12: mod_base = OTHER; note = sugar modification: 2'-O-methoxyethylribose; note = backbone modification: 5'-phosphorothioate
  modified_base 13: mod_base = OTHER; note = backbone modification: 5'-phosphorothioate; note = thymine; note = sugar modification: 2'-O-methoxyethylribose
  modified_base 14: mod_base = m5c; mod_base = OTHER; note = sugar modification: 2'-O-methoxyethylribose; note = backbone modification: 5'-phosphorothioate
  modified_base 15: mod_base = m5c; mod_base = OTHER; note = sugar modification: lna; note = backbone modification: 5'-phosphorothioate
  modified_base 16: mod_base = OTHER; mod_base = m5c; note = sugar modification: lna
tcttgtacttcatccc

SEQ ID NO: 972 - RNA, 16 nt, synthetic construct
  source 1..16: mol_type = other RNA; note = Antisense oligonucleotide
  modified_base 1: mod_base = OTHER; note = thymine; note = sugar modification: lna; note = backbone modification: 5'-phosphorothioate
  modified_base 2: mod_base = OTHER; mod_base = m5c; note = backbone modification: 5'-phosphorothioate; note = sugar modification: lna
  modified_base 3: mod_base = OTHER; note = backbone modification: 5'-phosphorothioate; note = thymine; note = sugar modification: lna
  modified_base 4: mod_base = OTHER; note = backbone modification: 5'-phosphorothioate; note = thymine; note = sugar modification: lna
  modified_base 5: mod_base = OTHER; note = sugar modification: 2'-O-methoxyethylribose; note = backbone modification: 5'-phosphorothioate
  modified_base 6: mod_base = OTHER; note = thymine; note = backbone modification: 5'-phosphorothioate; note = sugar modification: 2'-O-methoxyethylribose
  modified_base 7: mod_base = OTHER; note = backbone modification: 5'-phosphorothioate; note = sugar modification: 2'-O-methoxyethylribose
  modified_base 8: mod_base = m5c; mod_base = OTHER; note = sugar modification: 2'-O-methoxyethylribose; note = backbone modification: 5'-phosphorothioate
  modified_base 9: mod_base = OTHER; note = thymine; note = backbone modification: 5'-phosphorothioate; note = sugar modification: 2'-O-methoxyethylribose
  modified_base 10: mod_base = OTHER; note = sugar modification: 2'-O-methoxyethylribose; note = thymine; note = backbone modification: 5'-phosphorothioate
  modified_base 11: mod_base = m5c; mod_base = OTHER; note = backbone modification: 5'-phosphorothioate; note = sugar modification: 2'-O-methoxyethylribose
  modified_base 12: mod_base = OTHER; note = sugar modification: 2'-O-methoxyethylribose; note = backbone modification: 5'-phosphorothioate
  modified_base 13: mod_base = OTHER; note = sugar modification: 2'-O-methoxyethylribose; note = thymine; note = backbone modification: 5'-phosphorothioate
  modified_base 14: mod_base = OTHER; mod_base = m5c; note = sugar modification: 2'-O-methoxyethylribose; note = backbone modification: 5'-phosphorothioate
  modified_base 15: mod_base = m5c; mod_base = OTHER; note = backbone modification: 5'-phosphorothioate; note = sugar modification: lna
  modified_base 16: mod_base = OTHER; mod_base = m5c; note = sugar modification: lna
tcttgtacttcatccc

SEQ ID NO: 973 - RNA, 16 nt, synthetic construct
  source 1..16: mol_type = other RNA; note = Antisense oligonucleotide
  modified_base 1: mod_base = OTHER; note = sugar modification: lna; note = backbone modification: 5'-phosphorothioate; note = thymine
  modified_base 2: mod_base = OTHER; mod_base = m5c; note = backbone modification: 5'-phosphorothioate; note = sugar modification: 2'-O-methoxyethylribose
  modified_base 3: mod_base = OTHER; note = backbone modification: 5'-phosphorothioate; note = sugar modification: 2'-O-methoxyethylribose; note = thymine
  modified_base 4: mod_base = OTHER; note = thymine; note = backbone modification: 5'-phosphorothioate; note = sugar modification: 2'-O-methoxyethylribose
  modified_base 5: mod_base = OTHER; note = sugar modification: 2'-O-methoxyethylribose; note = backbone modification: 5'-phosphorothioate
  modified_base 6: mod_base = OTHER; note = backbone modification: 5'-phosphorothioate; note = sugar modification: 2'-O-methoxyethylribose; note = thymine
  modified_base 7: mod_base = OTHER; note = sugar modification: 2'-O-methoxyethylribose; note = backbone modification: 5'-phosphorothioate
  modified_base 8: mod_base = m5c; mod_base = OTHER; note = sugar modification: 2'-O-methoxyethylribose; note = backbone modification: 5'-phosphorothioate
  modified_base 9: mod_base = OTHER; note = sugar modification: 2'-O-methoxyethylribose; note = backbone modification: 5'-phosphorothioate; note = thymine
  modified_base 10: mod_base = OTHER; note = thymine; note = backbone modification: 5'-phosphorothioate; note = sugar modification: 2'-O-methoxyethylribose
  modified_base 11: mod_base = m5c; mod_base = OTHER; note = backbone modification: 5'-phosphorothioate; note = sugar modification: 2'-O-methoxyethylribose
  modified_base 12: mod_base = OTHER; note = sugar modification: 2'-O-methoxyethylribose; note = backbone modification: 5'-phosphorothioate
  modified_base 13: mod_base = OTHER; note = backbone modification: 5'-phosphorothioate; note = sugar modification: 2'-O-methoxyethylribose; note = thymine
  modified_base 14: mod_base = OTHER; mod_base = m5c; note = backbone modification: 5'-phosphorothioate; note = sugar modification: lna
  modified_base 15: mod_base = m5c; mod_base = OTHER; note = backbone modification: 5'-phosphorothioate; note = sugar modification: lna
  modified_base 16: mod_base = OTHER; mod_base = m5c; note = sugar modification: lna
tcttgtacttcatccc

SEQ ID NO: 974 - RNA, 16 nt, synthetic construct
  source 1..16: mol_type = other RNA; note = Antisense oligonucleotide
  modified_base 1: mod_base = OTHER; note = backbone modification: 5'-phosphorothioate; note = thymine; note = sugar modification: lna
  modified_base 2: mod_base = OTHER; mod_base = m5c; note = sugar modification: lna; note = backbone modification: 5'-phosphorothioate
  modified_base 3: mod_base = OTHER; note = thymine; note = sugar modification: 2'-O-methoxyethylribose; note = backbone modification: 5'-phosphorothioate
  modified_base 4: mod_base = OTHER; note = backbone modification: 5'-phosphorothioate; note = thymine; note = sugar modification: 2'-O-methoxyethylribose
  modified_base 5: mod_base = OTHER; note = backbone modification: 5'-phosphorothioate; note = sugar modification: 2'-O-methoxyethylribose
  modified_base 6: mod_base = OTHER; note = thymine; note = backbone modification: 5'-phosphorothioate; note = sugar modification: 2'-O-methoxyethylribose
  modified_base 7: mod_base = OTHER; note = sugar modification: 2'-O-methoxyethylribose; note = backbone modification: 5'-phosphorothioate
  modified_base 8: mod_base = OTHER; mod_base = m5c; note = sugar modification: 2'-O-methoxyethylribose; note = backbone modification: 5'-phosphorothioate
  modified_base 9: mod_base = OTHER; note = thymine; note = sugar modification: 2'-O-methoxyethylribose; note = backbone modification: 5'-phosphorothioate
  modified_base 10: mod_base = OTHER; note = backbone modification: 5'-phosphorothioate; note = thymine; note = sugar modification: 2'-O-methoxyethylribose
  modified_base 11: mod_base = OTHER; mod_base = m5c; note = sugar modification: 2'-O-methoxyethylribose; note = backbone modification: 5'-phosphorothioate
  modified_base 12: mod_base = OTHER; note = sugar modification: 2'-O-methoxyethylribose; note = backbone modification: 5'-phosphorothioate
  modified_base 13: mod_base = OTHER; note = thymine; note = backbone modification: 5'-phosphorothioate; note = sugar modification: 2'-O-methoxyethylribose
  modified_base 14: mod_base = OTHER; mod_base = m5c; note = sugar modification: lna; note = backbone modification: 5'-phosphorothioate
  modified_base 15: mod_base = m5c; mod_base = OTHER; note = backbone modification: 5'-phosphorothioate; note = sugar modification: lna
  modified_base 16: mod_base = OTHER; mod_base = m5c; note = sugar modification: lna
tcttgtacttcatccc

SEQ ID NO: 975 - RNA, 16 nt, synthetic construct
  source 1..16: mol_type = other RNA; note = Antisense oligonucleotide
  modified_base 1: mod_base = OTHER; note = sugar modification: lna; note = thymine; note = backbone modification: 5'-phosphorothioate
  modified_base 2: mod_base = OTHER; mod_base = m5c; note = sugar modification: lna; note = backbone modification: 5'-phosphorothioate
  modified_base 3: mod_base = OTHER; note = thymine; note = backbone modification: 5'-phosphorothioate; note = sugar modification: lna
  modified_base 4: mod_base = OTHER; note = backbone modification: 5'-phosphorothioate; note = sugar modification: lna; note = thymine
  modified_base 5: mod_base = OTHER; note = backbone modification: 5'-phosphorothioate; note = sugar modification: 2'-O-methoxyethylribose
  modified_base 6: mod_base = OTHER; note = sugar modification: 2'-O-methoxyethylribose; note = backbone modification: 5'-phosphorothioate; note = thymine
  modified_base 7: mod_base = OTHER; note = sugar modification: 2'-O-methoxyethylribose; note = backbone modification: 5'-phosphorothioate
  modified_base 8: mod_base = OTHER; mod_base = m5c; note = sugar modification: 2'-O-methoxyethylribose; note = backbone modification: 5'-phosphorothioate
  modified_base 9: mod_base = OTHER; note = sugar modification: 2'-O-methoxyethylribose; note = thymine; note = backbone modification: 5'-phosphorothioate
  modified_base 10: mod_base = OTHER; note = backbone modification: 5'-phosphorothioate; note = thymine; note = sugar modification: 2'-O-methoxyethylribose
  modified_base 11: mod_base = OTHER; mod_base = m5c; note = backbone modification: 5'-phosphorothioate; note = sugar modification: 2'-O-methoxyethylribose
  modified_base 12: mod_base = OTHER; note = sugar modification: 2'-O-methoxyethylribose; note = backbone modification: 5'-phosphorothioate
  modified_base 13: mod_base = OTHER; note = backbone modification: 5'-phosphorothioate; note = thymine; note = sugar modification: 2'-O-methoxyethylribose
  modified_base 14: mod_base = m5c; mod_base = OTHER; note = sugar modification: lna; note = backbone modification: 5'-phosphorothioate
  modified_base 15: mod_base = m5c; mod_base = OTHER; note = backbone modification: 5'-phosphorothioate; note = sugar modification: lna
  modified_base 16: mod_base = m5c; mod_base = OTHER; note = sugar modification: lna
tcttgtacttcatccc

SEQ ID NO: 976 - RNA, 16 nt, synthetic construct
  source 1..16: mol_type = other RNA; note = Antisense oligonucleotide
  modified_base 1: mod_base = OTHER; note = backbone modification: 5'-phosphorothioate; note = sugar modification: lna; note = thymine
  modified_base 2: mod_base = OTHER; mod_base = m5c; note = sugar modification: lna; note = backbone modification: 5'-phosphorothioate
  modified_base 3: mod_base = OTHER; note = sugar modification: 2'-O-methoxyethylribose; note = thymine; note = backbone modification: 5'-phosphorothioate
  modified_base 4: mod_base = OTHER; note = sugar modification: 2'-O-methoxyethylribose; note = backbone modification: 5'-phosphorothioate; note = thymine
  modified_base 5: mod_base = OTHER; note = sugar modification: 2'-O-methoxyethylribose; note = backbone modification: 5'-phosphorothioate
  modified_base 6: mod_base = OTHER; note = sugar modification: 2'-O-methoxyethylribose; note = thymine; note = backbone modification: 5'-phosphorothioate
  modified_base 7: mod_base = OTHER; note = backbone modification: 5'-phosphorothioate; note = sugar modification: 2'-O-methoxyethylribose
  modified_base 8: mod_base = OTHER; mod_base = m5c; note = backbone modification: 5'-phosphorothioate; note = sugar modification: 2'-O-methoxyethylribose
  modified_base 9: mod_base = OTHER; note = sugar modification: 2'-O-methoxyethylribose; note = thymine; note = backbone modification: 5'-phosphorothioate
  modified_base 10: mod_base = OTHER; note = thymine; note = sugar modification: 2'-O-methoxyethylribose; note = backbone modification: 5'-phosphorothioate
  modified_base 11: mod_base = OTHER; mod_base = m5c; note = sugar modification: 2'-O-methoxyethylribose; note = backbone modification: 5'-phosphorothioate
  modified_base 12: mod_base = OTHER; note = sugar modification: 2'-O-methoxyethylribose; note = backbone modification: 5'-phosphorothioate
  modified_base 13: mod_base = OTHER; note = sugar modification: lna; note = thymine; note = backbone modification: 5'-phosphorothioate
  modified_base 14: mod_base = m5c; mod_base = OTHER; note = sugar modification: lna; note = backbone modification: 5'-phosphorothioate
  modified_base 15: mod_base = OTHER; mod_base = m5c; note = backbone modification: 5'-phosphorothioate; note = sugar modification: lna
  modified_base 16: mod_base = m5c; mod_base = OTHER; note = sugar modification: lna
tcttgtacttcatccc

SEQ ID NO: 977 - RNA, 16 nt, synthetic construct
  source 1..16: mol_type = other RNA; note = Antisense oligonucleotide
  modified_base 1: mod_base = OTHER; note = thymine; note = backbone modification: 5'-phosphorothioate; note = sugar modification: lna
  modified_base 2: mod_base = m5c; mod_base = OTHER; note = sugar modification: lna; note = backbone modification: 5'-phosphorothioate
  modified_base 3: mod_base = OTHER; note = backbone modification: 5'-phosphorothioate; note = sugar modification: lna; note = thymine
  modified_base 4: mod_base = OTHER; note = thymine; note = backbone modification: 5'-phosphorothioate; note = sugar modification: 2'-O-methoxyethylribose
  modified_base 5: mod_base = OTHER; note = sugar modification: 2'-O-methoxyethylribose; note = backbone modification: 5'-phosphorothioate
  modified_base 6: mod_base = OTHER; note = sugar modification: 2'-O-methoxyethylribose; note = backbone modification: 5'-phosphorothioate; note = thymine
  modified_base 7: mod_base = OTHER; note = backbone modification: 5'-phosphorothioate; note = sugar modification: 2'-O-methoxyethylribose
  modified_base 8: mod_base = OTHER; mod_base = m5c; note = sugar modification: 2'-O-methoxyethylribose; note = backbone modification: 5'-phosphorothioate
  modified_base 9: mod_base = OTHER; note = thymine; note = sugar modification: 2'-O-methoxyethylribose; note = backbone modification: 5'-phosphorothioate
  modified_base 10: mod_base = OTHER; note = sugar modification: 2'-O-methoxyethylribose; note = thymine; note = backbone modification: 5'-phosphorothioate
  modified_base 11: mod_base = OTHER; mod_base = m5c; note = backbone modification: 5'-phosphorothioate; note = sugar modification: 2'-O-methoxyethylribose
  modified_base 12: mod_base = OTHER; note = backbone modification: 5'-phosphorothioate; note = sugar modification: 2'-O-methoxyethylribose
  modified_base 13: mod_base = OTHER; note = sugar modification: lna; note = backbone modification: 5'-phosphorothioate; note = thymine
  modified_base 14: mod_base = OTHER; mod_base = m5c; note = sugar modification: lna; note = backbone modification: 5'-phosphorothioate
  modified_base 15: mod_base = OTHER; mod_base = m5c; note = backbone modification: 5'-phosphorothioate; note = sugar modification: lna
  modified_base 16: mod_base = m5c; mod_base = OTHER; note = sugar modification: lna
tcttgtacttcatccc

SEQ ID NO: 978 - RNA, 16 nt, synthetic construct
  source 1..16: mol_type = other RNA; note = Antisense oligonucleotide
  modified_base 1: mod_base = OTHER; note = backbone modification: 5'-phosphorothioate; note = thymine; note = sugar modification: lna
  modified_base 2: mod_base = OTHER; mod_base = m5c; note = sugar modification: lna; note = backbone modification: 5'-phosphorothioate
  modified_base 3: mod_base = OTHER; note = sugar modification: lna; note = backbone modification: 5'-phosphorothioate; note = thymine
  modified_base 4: mod_base = OTHER; note = sugar modification: lna; note = backbone modification: 5'-phosphorothioate; note = thymine
  modified_base 5: mod_base = OTHER; note = sugar modification: 2'-O-methoxyethylribose; note = backbone modification: 5'-phosphorothioate
  modified_base 6: mod_base = OTHER; note = backbone modification: 5'-phosphorothioate; note = sugar modification: 2'-O-methoxyethylribose; note = thymine
  modified_base 7: mod_base = OTHER; note = backbone modification: 5'-phosphorothioate; note = sugar modification: 2'-O-methoxyethylribose
  modified_base 8: mod_base = OTHER; mod_base = m5c; note = backbone modification: 5'-phosphorothioate; note = sugar modification: 2'-O-methoxyethylribose
  modified_base 9: mod_base = OTHER; note = thymine; note = backbone modification: 5'-phosphorothioate; note = sugar modification: 2'-O-methoxyethylribose
  modified_base 10: mod_base = OTHER; note = backbone modification: 5'-phosphorothioate; note = thymine; note = sugar modification: 2'-O-methoxyethylribose
  modified_base 11: mod_base = OTHER; mod_base = m5c; note = sugar modification: 2'-O-methoxyethylribose; note = backbone modification: 5'-phosphorothioate
  modified_base 12: mod_base = OTHER; note = backbone modification: 5'-phosphorothioate; note = sugar modification: 2'-O-methoxyethylribose
  modified_base 13: mod_base = OTHER; note = backbone modification: 5'-phosphorothioate; note = sugar modification: lna; note = thymine
  modified_base 14: mod_base = OTHER; mod_base = m5c; note = sugar modification: lna; note = backbone modification: 5'-phosphorothioate
  modified_base 15: mod_base = m5c; mod_base = OTHER; note = sugar modification: lna; note = backbone modification: 5'-phosphorothioate
  modified_base 16: mod_base = OTHER; mod_base = m5c; note = sugar modification: lna
tcttgtacttcatccc

SEQ ID NO: 979 - RNA, 16 nt, synthetic construct
  source 1..16: mol_type = other RNA; note = Antisense oligonucleotide
  modified_base 1: mod_base = OTHER; note = thymine; note = sugar modification: lna; note = backbone modification: 5'-phosphorothioate
  modified_base 2: mod_base = m5c; mod_base = OTHER; note = sugar modification: lna; note = backbone modification: 5'-phosphorothioate
  modified_base 3: mod_base = OTHER; note = backbone modification: 5'-phosphorothioate; note = thymine; note = sugar modification: lna
  modified_base 4: mod_base = OTHER; note = sugar modification: lna; note = backbone modification: 5'-phosphorothioate; note = thymine
  modified_base 5: mod_base = OTHER; note = sugar modification: lna; note = backbone modification: 5'-phosphorothioate
  modified_base 6: mod_base = OTHER; note = thymine; note = backbone modification: 5'-phosphorothioate; note = sugar modification: 2'-O-methoxyethylribose
  modified_base 7: mod_base = OTHER; note = sugar modification: 2'-O-methoxyethylribose; note = backbone modification: 5'-phosphorothioate
  modified_base 8: mod_base = m5c; mod_base = OTHER; note = sugar modification: 2'-O-methoxyethylribose; note = backbone modification: 5'-phosphorothioate
  modified_base 9: mod_base = OTHER; note = thymine; note = backbone modification: 5'-phosphorothioate; note = sugar modification: 2'-O-methoxyethylribose
  modified_base 10: mod_base = OTHER; note = sugar modification: 2'-O-methoxyethylribose; note = thymine; note = backbone modification: 5'-phosphorothioate
  modified_base 11: mod_base = m5c; mod_base = OTHER; note = sugar modification: 2'-O-methoxyethylribose; note = backbone modification: 5'-phosphorothioate
  modified_base 12: mod_base = OTHER; note = backbone modification: 5'-phosphorothioate; note = sugar modification: lna
  modified_base 13: mod_base = OTHER; note = thymine; note = sugar modification: lna; note = backbone modification: 5'-phosphorothioate
  modified_base 14: mod_base = OTHER; mod_base = m5c; note = sugar modification: lna; note = backbone modification: 5'-phosphorothioate
  modified_base 15: mod_base = OTHER; mod_base = m5c; note = backbone modification: 5'-phosphorothioate; note = sugar modification: lna
  modified_base 16: mod_base = OTHER; mod_base = m5c; note = sugar modification: lna
tcttgtacttcatccc

SEQ ID NO: 980 - RNA, 16 nt, synthetic construct
  source 1..16: mol_type = other RNA; note = Antisense oligonucleotide
  modified_base 1: mod_base = OTHER; note = backbone modification: 5'-phosphorothioate; note = thymine; note = sugar modification: 2'-O-methoxyethylribose
  modified_base 2: mod_base = m5c; mod_base = OTHER; note = backbone modification: 5'-phosphorothioate; note = sugar modification: 2'-O-methoxyethylribose
  modified_base 3: mod_base = OTHER; note = sugar modification: 2'-O-methoxyethylribose; note = backbone modification: 5'-phosphorothioate; note = thymine
  modified_base 4: mod_base = OTHER; note = sugar modification: 2'-O-methoxyethylribose; note = thymine; note = backbone modification: 5'-phosphorothioate
  modified_base 5: mod_base = OTHER; note = sugar modification: 2'-O-methoxyethylribose; note = backbone modification: 5'-phosphorothioate
  modified_base 6: mod_base = OTHER; note = backbone modification: 5'-phosphorothioate; note = sugar modification: 2'-O-methoxyethylribose; note = thymine
  modified_base 7: mod_base = OTHER; note = sugar modification: 2'-O-methoxyethylribose; note = backbone modification: 5'-phosphorothioate
  modified_base 8: mod_base = OTHER; mod_base = m5c; note = sugar modification: 2'-O-methoxyethylribose; note = backbone modification: 5'-phosphorothioate
  modified_base 9: mod_base = OTHER; note = sugar modification: 2'-O-methoxyethylribose; note = thymine; note = backbone modification: 5'-phosphorothioate
  modified_base 10: mod_base = OTHER; note = sugar modification: 2'-O-methoxyethylribose; note = backbone modification: 5'-phosphorothioate; note = thymine
  modified_base 11: mod_base = m5c; mod_base = OTHER; note = backbone modification: 5'-phosphorothioate; note = sugar modification: 2'-O-methoxyethylribose
  modified_base 12: mod_base = OTHER; note = backbone modification: 5'-phosphorothioate; note = sugar modification: 2'-O-methoxyethylribose
  modified_base 13: mod_base = OTHER; note = sugar modification: 2'-O-methoxyethylribose; note = backbone modification: 5'-phosphorothioate; note = thymine
  modified_base 14: mod_base = m5c; mod_base = OTHER; note = backbone modification: 5'-phosphorothioate; note = sugar modification: 2'-O-methoxyethylribose
  modified_base 15: mod_base = OTHER; mod_base = m5c; note = backbone modification: 5'-phosphorothioate; note = sugar modification: 2'-O-methoxyethylribose
  modified_base 16: mod_base = OTHER; mod_base = m5c; note = sugar modification: lna
tcttgtacttcatccc

SEQ ID NO: 981 - RNA, 16 nt, synthetic construct
  source 1..16: mol_type = other RNA; note = Antisense oligonucleotide
  modified_base 1: mod_base = OTHER; note = thymine; note = sugar modification: 2'-O-methoxyethylribose; note = backbone modification: 5'-phosphorothioate
  modified_base 2: mod_base = OTHER; mod_base = m5c; note = backbone modification: 5'-phosphorothioate; note = sugar modification: 2'-O-methoxyethylribose
  modified_base 3: mod_base = OTHER; note = thymine; note = sugar modification: 2'-O-methoxyethylribose; note = backbone modification: 5'-phosphorothioate
  modified_base 4: mod_base = OTHER; note = backbone modification: 5'-phosphorothioate; note = thymine; note = sugar modification: 2'-O-methoxyethylribose
  modified_base 5: mod_base = OTHER; note = sugar modification: 2'-O-methoxyethylribose; note = backbone modification: 5'-phosphorothioate
  modified_base 6: mod_base = OTHER; note = sugar modification: 2'-O-methoxyethylribose; note = thymine; note = backbone modification: 5'-phosphorothioate
  modified_base 7: mod_base = OTHER; note = sugar modification: 2'-O-methoxyethylribose; note = backbone modification: 5'-phosphorothioate
  modified_base 8: mod_base = m5c; mod_base = OTHER; note = sugar modification: 2'-O-methoxyethylribose; note = backbone modification: 5'-phosphorothioate
  modified_base 9: mod_base = OTHER; note = sugar modification: 2'-O-methoxyethylribose; note = thymine; note = backbone modification: 5'-phosphorothioate
  modified_base 10: mod_base = OTHER; note = thymine; note = backbone modification: 5'-phosphorothioate; note = sugar modification: 2'-O-methoxyethylribose
  modified_base 11: mod_base = OTHER; mod_base = m5c; note = sugar modification: 2'-O-methoxyethylribose; note = backbone modification: 5'-phosphorothioate
  modified_base 12: mod_base = OTHER; note = sugar modification: 2'-O-methoxyethylribose; note = backbone modification: 5'-phosphorothioate
  modified_base 13: mod_base = OTHER; note = thymine; note = backbone modification: 5'-phosphorothioate; note = sugar modification: 2'-O-methoxyethylribose
  modified_base 14: mod_base = m5c; mod_base = OTHER; note = sugar modification: 2'-O-methoxyethylribose; note = backbone modification: 5'-phosphorothioate
  modified_base 15: mod_base = OTHER; mod_base = m5c; note = backbone modification: 5'-phosphorothioate; note = sugar modification: lna
  modified_base 16: mod_base = OTHER; mod_base = m5c; note = sugar modification: lna
tcttgtacttcatccc

SEQ ID NO: 982 - RNA, 16 nt, synthetic construct
  source 1..16: mol_type = other RNA; note = Antisense oligonucleotide
  modified_base 1: mod_base = OTHER; note = thymine; note = sugar modification: 2'-O-methoxyethylribose; note = backbone modification: 5'-phosphorothioate
  modified_base 2: mod_base = OTHER; mod_base = m5c; note = backbone modification: 5'-phosphorothioate; note = sugar modification: 2'-O-methoxyethylribose
  modified_base 3: mod_base = OTHER; note = sugar modification: 2'-O-methoxyethylribose; note = thymine; note = backbone modification: 5'-phosphorothioate
  modified_base 4: mod_base = OTHER; note = backbone modification: 5'-phosphorothioate; note = sugar modification: 2'-O-methoxyethylribose; note = thymine
  modified_base 5: mod_base = OTHER; note = sugar modification: 2'-O-methoxyethylribose; note = backbone modification: 5'-phosphorothioate
  modified_base 6: mod_base = OTHER; note = backbone modification: 5'-phosphorothioate; note = sugar modification: 2'-O-methoxyethylribose; note = thymine
  modified_base 7: mod_base = OTHER; note = sugar modification: 2'-O-methoxyethylribose; note = backbone modification: 5'-phosphorothioate
  modified_base 8: mod_base = OTHER; mod_base = m5c; note = sugar modification: 2'-O-methoxyethylribose; note = backbone modification: 5'-phosphorothioate
  modified_base 9: mod_base = OTHER; note = sugar modification: 2'-O-methoxyethylribose; note = thymine; note = backbone modification: 5'-phosphorothioate
  modified_base 10: mod_base = OTHER; note = thymine; note = sugar modification: 2'-O-methoxyethylribose; note = backbone modification: 5'-phosphorothioate
  modified_base 11: mod_base = m5c; mod_base = OTHER; note = backbone modification: 5'-phosphorothioate; note = sugar modification: 2'-O-methoxyethylribose
  modified_base 12: mod_base = OTHER; note = backbone modification: 5'-phosphorothioate; note = sugar modification: 2'-O-methoxyethylribose
  modified_base 13: mod_base = OTHER; note = thymine; note = backbone modification: 5'-phosphorothioate; note = sugar modification: 2'-O-methoxyethylribose
  modified_base 14: mod_base = m5c; mod_base = OTHER; note = sugar modification: lna; note = backbone modification: 5'-phosphorothioate
  modified_base 15: mod_base = m5c; mod_base = OTHER; note = backbone modification: 5'-phosphorothioate; note = sugar modification: lna
  modified_base 16: mod_base = OTHER; mod_base = m5c; note = sugar modification: lna
tcttgtacttcatccc

SEQ ID NO: 983 - RNA, 16 nt, synthetic construct
  source 1..16: mol_type = other RNA; note = Antisense oligonucleotide
  modified_base 1: mod_base = OTHER; note = sugar modification: lna; note = backbone modification: 5'-phosphorothioate; note = thymine
  modified_base 2: mod_base = OTHER; note = backbone modification: 5'-phosphorothioate; note = sugar modification: lna; note = thymine
  modified_base 3: mod_base = OTHER; mod_base = m5c; note = backbone modification: 5'-phosphorothioate; note = sugar modification: 2'-O-methoxyethylribose
  modified_base 4: mod_base = OTHER; note = sugar modification: 2'-O-methoxyethylribose; note = thymine; note = backbone modification: 5'-phosphorothioate
  modified_base 5: mod_base = OTHER; note = thymine; note = backbone modification: 5'-phosphorothioate; note = sugar modification: 2'-O-methoxyethylribose
  modified_base 6: mod_base = OTHER; note = sugar modification: 2'-O-methoxyethylribose; note = backbone modification: 5'-phosphorothioate
  modified_base 7: mod_base = OTHER; note = backbone modification: 5'-phosphorothioate; note = thymine; note = sugar modification: 2'-O-methoxyethylribose
  modified_base 8: mod_base = OTHER; note = sugar modification: 2'-O-methoxyethylribose; note = backbone modification: 5'-phosphorothioate
  modified_base 9: mod_base = m5c; mod_base = OTHER; note = sugar modification: 2'-O-methoxyethylribose; note = backbone modification: 5'-phosphorothioate
  modified_base 10: mod_base = OTHER; note = sugar modification: 2'-O-methoxyethylribose; note = backbone modification: 5'-phosphorothioate; note = thymine
  modified_base 11: mod_base = OTHER; note = sugar modification: 2'-O-methoxyethylribose; note = backbone modification: 5'-phosphorothioate; note = thymine
  modified_base 12: mod_base = OTHER; mod_base = m5c; note = sugar modification: 2'-O-methoxyethylribose; note = backbone modification: 5'-phosphorothioate
  modified_base 13: mod_base = OTHER; note = backbone modification: 5'-phosphorothioate; note = sugar modification: 2'-O-methoxyethylribose
  modified_base 14: mod_base = OTHER; note = backbone modification: 5'-phosphorothioate; note = thymine; note = sugar modification: 2'-O-methoxyethylribose
  modified_base 15: mod_base = m5c; mod_base = OTHER; note = sugar modification: lna; note = backbone modification: 5'-phosphorothioate
  modified_base 16: mod_base = m5c; mod_base = OTHER; note = sugar modification: lna
ttcttgtacttcatcc

SEQ ID NO: 984 - RNA, 16 nt, synthetic construct
  source 1..16: mol_type = other RNA; note = Antisense oligonucleotide
  modified_base 1: mod_base = OTHER; note = thymine; note = sugar modification: lna; note = backbone modification: 5'-phosphorothioate
  modified_base 2: mod_base = OTHER; note = backbone modification: 5'-phosphorothioate; note = thymine; note = sugar modification: 2'-O-methoxyethylribose
  modified_base 3: mod_base = m5c; mod_base = OTHER; note = sugar modification: 2'-O-methoxyethylribose; note = backbone modification: 5'-phosphorothioate
  modified_base 4: mod_base = OTHER; note = thymine; note = backbone modification: 5'-phosphorothioate; note = sugar modification: 2'-O-methoxyethylribose
  modified_base 5: mod_base = OTHER; note = backbone modification: 5'-phosphorothioate; note = thymine; note = sugar modification: 2'-O-methoxyethylribose
  modified_base 6: mod_base = OTHER; note = sugar modification: 2'-O-methoxyethylribose; note = backbone modification: 5'-phosphorothioate
  modified_base 7: mod_base = OTHER; note = thymine; note = sugar modification: 2'-O-methoxyethylribose; note = backbone modification: 5'-phosphorothioate
  modified_base 8: mod_base = OTHER; note = sugar modification: 2'-O-methoxyethylribose; note = backbone modification: 5'-phosphorothioate
  modified_base 9: mod_base = m5c; mod_base = OTHER; note = sugar modification: 2'-O-methoxyethylribose; note = backbone modification: 5'-phosphorothioate
  modified_base 10: mod_base = OTHER; note = backbone modification: 5'-phosphorothioate; note = sugar modification: 2'-O-methoxyethylribose; note = thymine
  modified_base 11: mod_base = OTHER; note = backbone modification: 5'-phosphorothioate; note = sugar modification: 2'-O-methoxyethylribose; note = thymine
  modified_base 12: mod_base = OTHER; mod_base = m5c; note = backbone modification: 5'-phosphorothioate; note = sugar modification: 2'-O-methoxyethylribose
  modified_base 13: mod_base = OTHER; note = backbone modification: 5'-phosphorothioate; note = sugar modification: 2'-O-methoxyethylribose
  modified_base 14: mod_base = OTHER; note = sugar modification: 2'-O-methoxyethylribose; note = thymine; note = backbone modification: 5'-phosphorothioate
  modified_base 15: mod_base = OTHER; mod_base = m5c; note = sugar modification: 2'-O-methoxyethylribose; note = backbone modification: 5'-phosphorothioate
  modified_base 16: mod_base = m5c; mod_base = OTHER; note = sugar modification: 2'-O-methoxyethylribose
ttcttgtacttcatcc

SEQ ID NO: 985 - RNA, 16 nt, synthetic construct
  source 1..16: mol_type = other RNA; note = Antisense oligonucleotide
  modified_base 1: mod_base = OTHER; note = thymine; note = backbone modification: 5'-phosphorothioate; note = sugar modification: lna
  modified_base 2: mod_base = OTHER; note = thymine; note = sugar modification: lna; note = backbone modification: 5'-phosphorothioate
  modified_base 3: mod_base = m5c; mod_base = OTHER; note = sugar modification: 2'-O-methoxyethylribose; note = backbone modification: 5'-phosphorothioate
  modified_base 4: mod_base = OTHER; note = thymine; note = sugar modification: 2'-O-methoxyethylribose; note = backbone modification: 5'-phosphorothioate
  modified_base 5: mod_base = OTHER; note = thymine; note = backbone modification: 5'-phosphorothioate; note = sugar modification: 2'-O-methoxyethylribose
  modified_base 6: mod_base = OTHER; note = backbone modification: 5'-phosphorothioate; note = sugar modification: 2'-O-methoxyethylribose
  modified_base 7: mod_base = OTHER; note = backbone modification: 5'-phosphorothioate; note = thymine; note = sugar modification: 2'-O-methoxyethylribose
  modified_base 8: mod_base = OTHER; note = backbone modification: 5'-phosphorothioate; note = sugar modification: 2'-O-methoxyethylribose
  modified_base 9: mod_base = m5c; mod_base = OTHER; note = sugar modification: 2'-O-methoxyethylribose; note = backbone modification: 5'-phosphorothioate
  modified_base 10: mod_base = OTHER; note = sugar modification: 2'-O-methoxyethylribose; note = backbone modification: 5'-phosphorothioate; note = thymine
  modified_base 11: mod_base = OTHER; note = sugar modification: 2'-O-methoxyethylribose; note = backbone modification: 5'-phosphorothioate; note = thymine
  modified_base 12: mod_base = m5c; mod_base = OTHER; note = sugar modification: 2'-O-methoxyethylribose; note = backbone modification: 5'-phosphorothioate
  modified_base 13: mod_base = OTHER; note = sugar modification: 2'-O-methoxyethylribose; note = backbone modification: 5'-phosphorothioate
  modified_base 14: mod_base = OTHER; note = thymine; note = sugar modification: 2'-O-methoxyethylribose; note = backbone modification: 5'-phosphorothioate
  modified_base 15: mod_base = OTHER; mod_base = m5c; note = backbone modification: 5'-phosphorothioate; note = sugar modification: 2'-O-methoxyethylribose
  modified_base 16: mod_base = OTHER; mod_base = m5c; note = sugar modification: 2'-O-methoxyethylribose
ttcttgtacttcatcc

SEQ ID NO: 986 - RNA, 16 nt, synthetic construct
  source 1..16: mol_type = other RNA; note = Antisense oligonucleotide
  modified_base 1: mod_base = OTHER; note = thymine; note = sugar modification: lna; note = backbone modification: 5'-phosphorothioate
  modified_base 2: mod_base = OTHER; note = sugar modification: lna; note = thymine; note = backbone modification: 5'-phosphorothioate
  modified_base 3: mod_base = OTHER; mod_base = m5c; note = backbone modification: 5'-phosphorothioate; note = sugar modification: lna
  modified_base 4: mod_base = OTHER; note = backbone modification: 5'-phosphorothioate; note = sugar modification: 2'-O-methoxyethylribose; note = thymine
  modified_base 5: mod_base = OTHER; note = sugar modification: 2'-O-methoxyethylribose; note = backbone modification: 5'-phosphorothioate; note = thymine
  modified_base 6: mod_base = OTHER; note = backbone modification: 5'-phosphorothioate; note = sugar modification: 2'-O-methoxyethylribose
  modified_base 7: mod_base = OTHER; note = sugar modification: 2'-O-methoxyethylribose; note = backbone modification: 5'-phosphorothioate; note = thymine
  modified_base 8: mod_base = OTHER; note = backbone modification: 5'-phosphorothioate; note = sugar modification: 2'-O-methoxyethylribose
  modified_base 9: mod_base = OTHER; mod_base = m5c; note = backbone modification: 5'-phosphorothioate; note = sugar modification: 2'-O-methoxyethylribose
  modified_base 10: mod_base = OTHER; note = sugar modification: 2'-O-methoxyethylribose; note = backbone modification: 5'-phosphorothioate; note = thymine
  modified_base 11: mod_base = OTHER; note = sugar modification: 2'-O-methoxyethylribose; note = backbone modification: 5'-phosphorothioate; note = thymine
  modified_base 12: mod_base = OTHER; mod_base = m5c; note = backbone modification: 5'-phosphorothioate; note = sugar modification: 2'-O-methoxyethylribose
  modified_base 13: mod_base = OTHER; note = sugar modification: 2'-O-methoxyethylribose; note = backbone modification: 5'-phosphorothioate
  modified_base 14: mod_base = OTHER; note = thymine; note = backbone modification: 5'-phosphorothioate; note = sugar modification: 2'-O-methoxyethylribose
  modified_base 15: mod_base = m5c; mod_base = OTHER; note = backbone modification: 5'-phosphorothioate; note = sugar modification: 2'-O-methoxyethylribose
  modified_base 16: mod_base = OTHER; mod_base = m5c; note = sugar modification: 2'-O-methoxyethylribose
ttcttgtacttcatcc

SEQ ID NO: 987 - RNA, 16 nt, synthetic construct
  source 1..16: mol_type = other RNA; note = Antisense oligonucleotide
  modified_base 1: mod_base = OTHER; note = sugar modification: lna; note = thymine; note = backbone modification: 5'-phosphorothioate
  modified_base 2: mod_base = OTHER; note = sugar modification: 2'-O-methoxyethylribose; note = thymine; note = backbone modification: 5'-phosphorothioate
  modified_base 3: mod_base = OTHER; mod_base = m5c; note = sugar modification: 2'-O-methoxyethylribose; note = backbone modification: 5'-phosphorothioate
  modified_base 4: mod_base = OTHER; note = thymine; note = sugar modification: 2'-O-methoxyethylribose; note = backbone modification: 5'-phosphorothioate
  modified_base 5: mod_base = OTHER; note = sugar modification: 2'-O-methoxyethylribose; note = thymine; note = backbone modification: 5'-phosphorothioate
  modified_base 6: mod_base = OTHER; note = sugar modification: 2'-O-methoxyethylribose; note = backbone modification: 5'-phosphorothioate
  modified_base 7: mod_base = OTHER; note = sugar modification: 2'-O-methoxyethylribose; note = thymine; note = backbone modification: 5'-phosphorothioate
  modified_base 8: mod_base = OTHER; note = backbone modification: 5'-phosphorothioate; note = sugar modification: 2'-O-methoxyethylribose
  modified_base 9: mod_base = m5c; mod_base = OTHER; note = backbone modification: 5'-phosphorothioate; note = sugar modification: 2'-O-methoxyethylribose
  modified_base 10: mod_base = OTHER; note = sugar modification: 2'-O-methoxyethylribose; note = backbone modification: 5'-phosphorothioate; note = thymine
  modified_base 11: mod_base = OTHER; note = backbone modification: 5'-phosphorothioate; note = sugar modification: 2'-O-methoxyethylribose; note = thymine
  modified_base 12: mod_base = m5c; mod_base = OTHER; note = sugar modification: 2'-O-methoxyethylribose; note = backbone modification: 5'-phosphorothioate
  modified_base 13: mod_base = OTHER; note = backbone modification: 5'-phosphorothioate; note = sugar modification: 2'-O-methoxyethylribose
  modified_base 14: mod_base = OTHER; note = sugar modification: 2'-O-methoxyethylribose; note = thymine; note = backbone modification: 5'-phosphorothioate
  modified_base 15: mod_base = m5c; mod_base = OTHER; note = sugar modification: 2'-O-methoxyethylribose; note = backbone modification: 5'-phosphorothioate
  modified_base 16: mod_base = m5c; mod_base = OTHER; note = sugar modification: lna
ttcttgtacttcatcc

SEQ ID NO: 988 - RNA, 16 nt, synthetic construct
  source 1..16: mol_type = other RNA; note = Antisense oligonucleotide
  modified_base 1: mod_base = OTHER; note = thymine; note = sugar modification: lna; note = backbone modification: 5'-phosphorothioate
  modified_base 2: mod_base = OTHER; note = thymine; note = sugar modification: lna; note = backbone modification: 5'-phosphorothioate
  modified_base 3: mod_base = OTHER; mod_base = m5c; note = sugar modification: 2'-O-methoxyethylribose; note = backbone modification: 5'-phosphorothioate
  modified_base 4: mod_base = OTHER; note = thymine; note = backbone modification: 5'-phosphorothioate; note = sugar modification: 2'-O-methoxyethylribose
  modified_base 5: mod_base = OTHER; note = backbone modification: 5'-phosphorothioate; note = thymine; note = sugar modification: 2'-O-methoxyethylribose
  modified_base 6: mod_base = OTHER; note = backbone modification: 5'-phosphorothioate; note = sugar modification: 2'-O-methoxyethylribose
  modified_base 7: mod_base = OTHER; note = sugar modification: 2'-O-methoxyethylribose; note = backbone modification: 5'-phosphorothioate; note = thymine
  modified_base 8: mod_base = OTHER; note = sugar modification: 2'-O-methoxyethylribose; note = backbone modification: 5'-phosphorothioate
  modified_base 9: mod_base = m5c; mod_base = OTHER; note = backbone modification: 5'-phosphorothioate; note = sugar modification: 2'-O-methoxyethylribose
  modified_base 10: mod_base = OTHER; note = sugar modification: 2'-O-methoxyethylribose; note = thymine; note = backbone modification: 5'-phosphorothioate
  modified_base 11: mod_base = OTHER; note = thymine; note = backbone modification: 5'-phosphorothioate; note = sugar modification: 2'-O-methoxyethylribose
  modified_base 12: mod_base = m5c; mod_base = OTHER; note = backbone modification: 5'-phosphorothioate; note = sugar modification: 2'-O-methoxyethylribose
  modified_base 13: mod_base = OTHER; note = backbone modification: 5'-phosphorothioate; note = sugar modification: 2'-O-methoxyethylribose
  modified_base 14: mod_base = OTHER; note = backbone modification: 5'-phosphorothioate; note = thymine; note = sugar modification: 2'-O-methoxyethylribose
  modified_base 15: mod_base = m5c; mod_base = OTHER; note = backbone modification: 5'-phosphorothioate; note = sugar modification: 2'-O-methoxyethylribose
  modified_base 16: mod_base = OTHER; mod_base = m5c; note = sugar modification: lna
ttcttgtacttcatcc

SEQ ID NO: 989 - RNA, 16 nt, synthetic construct
  source 1..16: mol_type = other RNA; note = Antisense oligonucleotide
  modified_base 1: mod_base = OTHER; note = thymine; note = sugar modification: lna; note = backbone modification: 5'-phosphorothioate
  modified_base 2: mod_base = OTHER; note = backbone modification: 5'-phosphorothioate; note = sugar modification: lna; note = thymine
  modified_base 3: mod_base = m5c; mod_base = OTHER; note = sugar modification: lna; note = backbone modification: 5'-phosphorothioate
  modified_base 4: mod_base = OTHER; note = sugar modification: 2'-O-methoxyethylribose; note = thymine; note = backbone modification: 5'-phosphorothioate
  modified_base 5: mod_base = OTHER; note = backbone modification: 5'-phosphorothioate; note = thymine; note = sugar modification: 2'-O-methoxyethylribose
  modified_base 6: mod_base = OTHER; note = backbone modification: 5'-phosphorothioate; note = sugar modification: 2'-O-methoxyethylribose
  modified_base 7: mod_base = OTHER; note = thymine; note = sugar modification: 2'-O-methoxyethylribose; note = backbone modification: 5'-phosphorothioate
  modified_base 8: mod_base = OTHER; note = backbone modification: 5'-phosphorothioate; note = sugar modification: 2'-O-methoxyethylribose
  modified_base 9: mod_base = m5c; mod_base = OTHER; note = sugar modification: 2'-O-methoxyethylribose; note = backbone modification: 5'-phosphorothioate
  modified_base 10: mod_base = OTHER; note = sugar modification: 2'-O-methoxyethylribose; note = thymine; note = backbone modification: 5'-phosphorothioate
  modified_base 11: mod_base = OTHER; note = sugar modification: 2'-O-methoxyethylribose; note = backbone modification: 5'-phosphorothioate; note = thymine
  modified_base 12: mod_base = m5c; mod_base = OTHER; note = sugar modification: 2'-O-methoxyethylribose; note = backbone modification: 5'-phosphorothioate
  modified_base 13: mod_base = OTHER; note = backbone modification: 5'-phosphorothioate; note = sugar modification: 2'-O-methoxyethylribose
  modified_base 14: mod_base = OTHER; note = sugar modification: 2'-O-methoxyethylribose; note = backbone modification: 5'-phosphorothioate; note = thymine
  modified_base 15: mod_base = OTHER; mod_base = m5c; note = sugar modification: 2'-O-methoxyethylribose; note = backbone modification: 5'-phosphorothioate
  modified_base 16: mod_base = OTHER; mod_base = m5c; note = sugar modification: lna
ttcttgtacttcatcc

SEQ ID NO: 990 - RNA, 16 nt, synthetic construct
  source 1..16: mol_type = other RNA; note = Antisense oligonucleotide
  modified_base 1: mod_base = OTHER; note = thymine; note = backbone modification: 5'-phosphorothioate; note = sugar modification: lna
  modified_base 2: mod_base = OTHER; note = sugar modification: 2'-O-methoxyethylribose; note = backbone modification: 5'-phosphorothioate; note = thymine
  modified_base 3: mod_base = m5c; mod_base = OTHER; note = backbone modification: 5'-phosphorothioate; note = sugar modification: 2'-O-methoxyethylribose
  modified_base 4: mod_base = OTHER; note = backbone modification: 5'-phosphorothioate; note = sugar modification: 2'-O-methoxyethylribose; note = thymine
  modified_base 5: mod_base = OTHER; note = thymine; note = backbone modification: 5'-phosphorothioate; note = sugar modification: 2'-O-methoxyethylribose
  modified_base 6: mod_base = OTHER; note = sugar modification: 2'-O-methoxyethylribose; note = backbone modification: 5'-phosphorothioate
  modified_base 7: mod_base = OTHER; note = thymine; note = sugar modification: 2'-O-methoxyethylribose; note = backbone modification: 5'-phosphorothioate
  modified_base 8: mod_base = OTHER; note = backbone modification: 5'-phosphorothioate; note = sugar modification: 2'-O-methoxyethylribose
  modified_base 9: mod_base = m5c; mod_base = OTHER; note = backbone modification: 5'-phosphorothioate; note = sugar modification: 2'-O-methoxyethylribose
  modified_base 10: mod_base = OTHER; note = sugar modification: 2'-O-methoxyethylribose; note = backbone modification: 5'-phosphorothioate; note = thymine
  modified_base 11: mod_base = OTHER; note = thymine; note = backbone modification: 5'-phosphorothioate; note = sugar modification: 2'-O-methoxyethylribose
  modified_base 12: mod_base = OTHER; mod_base = m5c; note = backbone modification: 5'-phosphorothioate; note = sugar modification: 2'-O-methoxyethylribose
  modified_base 13: mod_base = OTHER; note = backbone modification: 5'-phosphorothioate; note = sugar modification: 2'-O-methoxyethylribose
  modified_base 14: mod_base = OTHER; note = sugar modification: 2'-O-methoxyethylribose; note = thymine; note = backbone modification: 5'-phosphorothioate
  modified_base 15: mod_base = OTHER; mod_base = m5c; note = backbone modification: 5'-phosphorothioate; note = sugar modification: lna
  modified_base 16: mod_base = m5c; mod_base = OTHER; note = sugar modification: lna
ttcttgtacttcatcc

SEQ ID NO: 991 - RNA, 16 nt, synthetic construct
  source 1..16: mol_type = other RNA; note = Antisense oligonucleotide
  modified_base 1: mod_base = OTHER; note = backbone modification: 5'-phosphorothioate; note = thymine; note = sugar modification: lna
  modified_base 2: mod_base = OTHER; note = sugar modification: lna; note = backbone modification: 5'-phosphorothioate; note = thymine
  modified_base 3: mod_base = OTHER; mod_base = m5c; note = backbone modification: 5'-phosphorothioate; note = sugar modification: lna
  modified_base 4: mod_base = OTHER; note = thymine; note = backbone modification: 5'-phosphorothioate; note = sugar modification: 2'-O-methoxyethylribose
  modified_base 5: mod_base = OTHER; note = thymine; note = backbone modification: 5'-phosphorothioate; note = sugar modification: 2'-O-methoxyethylribose
  modified_base 6: mod_base = OTHER; note = backbone modification: 5'-phosphorothioate; note = sugar modification: 2'-O-methoxyethylribose
  modified_base 7: mod_base = OTHER; note = sugar modification: 2'-O-methoxyethylribose; note = backbone modification: 5'-phosphorothioate; note = thymine
  modified_base 8: mod_base = OTHER; note = backbone modification: 5'-phosphorothioate; note = sugar modification: 2'-O-methoxyethylribose
  modified_base 9: mod_base = OTHER; mod_base = m5c; note = backbone modification: 5'-phosphorothioate; note = sugar modification: 2'-O-methoxyethylribose
  modified_base 10: mod_base = OTHER; note = thymine; note = backbone modification: 5'-phosphorothioate; note = sugar modification: 2'-O-methoxyethylribose
  modified_base 11: mod_base = OTHER; note = sugar modification: 2'-O-methoxyethylribose; note = thymine; note = backbone modification: 5'-phosphorothioate
  modified_base 12: mod_base = m5c; mod_base = OTHER; note = sugar modification: 2'-O-methoxyethylribose; note = backbone modification: 5'-phosphorothioate
  modified_base 13: mod_base = OTHER; note = sugar modification: 2'-O-methoxyethylribose; note = backbone modification: 5'-phosphorothioate
  modified_base 14: mod_base = OTHER; note = thymine; note = backbone modification: 5'-phosphorothioate; note = sugar modification: 2'-O-methoxyethylribose
  modified_base 15: mod_base = m5c; mod_base = OTHER; note = backbone modification: 5'-phosphorothioate; note = sugar modification: lna
  modified_base 16: mod_base = OTHER; mod_base = m5c; note = sugar modification: lna
ttcttgtacttcatcc

SEQ ID NO: 992 - RNA, 16 nt, synthetic construct
  source 1..16: mol_type = other RNA; note = Antisense oligonucleotide
  modified_base 1: mod_base = OTHER; note = backbone modification: 5'-phosphorothioate; note = sugar modification: lna; note = thymine
  modified_base 2: mod_base = OTHER; note = thymine; note = backbone modification: 5'-phosphorothioate; note = sugar modification: lna
  modified_base 3: mod_base = m5c; mod_base = OTHER; note = sugar modification: lna; note = backbone modification: 5'-phosphorothioate
  modified_base 4: mod_base = OTHER; note = thymine; note = sugar modification: lna; note = backbone modification: 5'-phosphorothioate
  modified_base 5: mod_base = OTHER; note = backbone modification: 5'-phosphorothioate; note = sugar modification: 2'-O-methoxyethylribose; note = thymine
  modified_base 6: mod_base = OTHER; note = backbone modification: 5'-phosphorothioate; note = sugar modification: 2'-O-methoxyethylribose
  modified_base 7: mod_base = OTHER; note = thymine; note = backbone modification: 5'-phosphorothioate; note = sugar modification: 2'-O-methoxyethylribose
  modified_base 8: mod_base = OTHER; note = sugar modification: 2'-O-methoxyethylribose; note = backbone modification: 5'-phosphorothioate
  modified_base 9: mod_base = m5c; mod_base = OTHER; note = backbone modification: 5'-phosphorothioate; note = sugar modification: 2'-O-methoxyethylribose
  modified_base 10: mod_base = OTHER; note = sugar modification: 2'-O-methoxyethylribose; note = thymine; note = backbone modification: 5'-phosphorothioate
  modified_base 11: mod_base = OTHER; note = backbone modification: 5'-phosphorothioate; note = thymine; note = sugar modification: 2'-O-methoxyethylribose
  modified_base 12: mod_base = OTHER; mod_base = m5c; note = backbone modification: 5'-phosphorothioate; note = sugar modification: 2'-O-methoxyethylribose
  modified_base 13: mod_base = OTHER; note = backbone modification: 5'-phosphorothioate; note = sugar modification: 2'-O-methoxyethylribose
  modified_base 14: mod_base = OTHER; note = sugar modification: 2'-O-methoxyethylribose; note = thymine; note = backbone modification: 5'-phosphorothioate
  modified_base 15: mod_base = m5c; mod_base = OTHER; note = backbone modification: 5'-phosphorothioate; note = sugar modification: lna
  modified_base 16: mod_base = OTHER; mod_base = m5c; note = sugar modification: lna
ttcttgtacttcatcc

SEQ ID NO: 993 - RNA, 16 nt, synthetic construct
  source 1..16: mol_type = other RNA; note = Antisense oligonucleotide
  modified_base 1: mod_base = OTHER; note = thymine; note = sugar modification: lna; note = backbone modification: 5'-phosphorothioate
  modified_base 2: mod_base = OTHER; note = sugar modification: 2'-O-methoxyethylribose; note = thymine; note = backbone modification: 5'-phosphorothioate
  modified_base 3: mod_base = OTHER; mod_base = m5c; note = sugar modification: 2'-O-methoxyethylribose; note = backbone modification: 5'-phosphorothioate
  modified_base 4: mod_base = OTHER; note = thymine; note = sugar modification: 2'-O-methoxyethylribose; note = backbone modification: 5'-phosphorothioate
  modified_base 5: mod_base = OTHER; note = thymine; note = backbone modification: 5'-phosphorothioate; note = sugar modification: 2'-O-methoxyethylribose
  modified_base 6: mod_base = OTHER; note = sugar modification: 2'-O-methoxyethylribose; note = backbone modification: 5'-phosphorothioate
  modified_base 7: mod_base = OTHER; note = sugar modification: 2'-O-methoxyethylribose; note = backbone modification: 5'-phosphorothioate; note = thymine
  modified_base 8: mod_base = OTHER; note = sugar modification: 2'-O-methoxyethylribose; note = backbone modification: 5'-phosphorothioate
  modified_base 9: mod_base = OTHER; mod_base = m5c; note = backbone modification: 5'-phosphorothioate; note = sugar modification: 2'-O-methoxyethylribose
  modified_base 10: mod_base = OTHER; note = sugar modification: 2'-O-methoxyethylribose; note = backbone modification: 5'-phosphorothioate; note = thymine
  modified_base 11: mod_base = OTHER; note = sugar modification: 2'-O-methoxyethylribose; note = backbone modification: 5'-phosphorothioate; note = thymine
  modified_base 12: mod_base = m5c; mod_base = OTHER; note = sugar modification: 2'-O-methoxyethylribose; note = backbone modification: 5'-phosphorothioate
  modified_base 13: mod_base = OTHER; note = sugar modification: 2'-O-methoxyethylribose; note = backbone modification: 5'-phosphorothioate
  modified_base 14: mod_base = OTHER; note = thymine; note = sugar modification: lna; note = backbone modification: 5'-phosphorothioate
  modified_base 15: mod_base = m5c; mod_base = OTHER; note = sugar modification: lna; note = backbone modification: 5'-phosphorothioate
  modified_base 16: mod_base = m5c; mod_base = OTHER; note = sugar modification: lna
ttcttgtacttcatcc

SEQ ID NO: 994 - RNA, 16 nt, synthetic construct
  source 1..16: mol_type = other RNA; note = Antisense oligonucleotide
  modified_base 1: mod_base = OTHER; note = thymine; note = backbone modification: 5'-phosphorothioate; note = sugar modification: lna
  modified_base 2: mod_base = OTHER; note = thymine; note = backbone modification: 5'-phosphorothioate; note = sugar modification: lna
  modified_base 3: mod_base = m5c; mod_base = OTHER; note = sugar modification: 2'-O-methoxyethylribose; note = backbone modification: 5'-phosphorothioate
  modified_base 4: mod_base = OTHER; note = sugar modification: 2'-O-methoxyethylribose; note = backbone modification: 5'-phosphorothioate; note = thymine
  modified_base 5: mod_base = OTHER; note = backbone modification: 5'-phosphorothioate; note = thymine; note = sugar modification: 2'-O-methoxyethylribose
  modified_base 6: mod_base = OTHER; note = backbone modification: 5'-phosphorothioate; note = sugar modification: 2'-O-methoxyethylribose
  modified_base 7: mod_base = OTHER; note = backbone modification: 5'-phosphorothioate; note = sugar modification: 2'-O-methoxyethylribose; note = thymine
  modified_base 8: mod_base = OTHER; note = backbone modification: 5'-phosphorothioate; note = sugar modification: 2'-O-methoxyethylribose
  modified_base 9: mod_base = OTHER; mod_base = m5c; note = backbone modification: 5'-phosphorothioate; note = sugar modification: 2'-O-methoxyethylribose
  modified_base 10: mod_base = OTHER; note = thymine; note = backbone modification: 5'-phosphorothioate; note = sugar modification: 2'-O-methoxyethylribose
  modified_base 11: mod_base = OTHER; note = thymine; note = backbone modification: 5'-phosphorothioate; note = sugar modification: 2'-O-methoxyethylribose
  modified_base 12: mod_base = m5c; mod_base = OTHER; note = backbone modification: 5'-phosphorothioate; note = sugar modification: 2'-O-methoxyethylribose
  modified_base 13: mod_base = OTHER; note = backbone modification: 5'-phosphorothioate; note = sugar modification: 2'-O-methoxyethylribose
  modified_base 14: mod_base = OTHER; note = sugar modification: lna; note = thymine; note = backbone modification: 5'-phosphorothioate
  modified_base 15: mod_base = m5c; mod_base = OTHER; note = backbone modification: 5'-phosphorothioate; note = sugar modification: lna
  modified_base 16: mod_base = m5c; mod_base = OTHER; note = sugar modification: lna
ttcttgtacttcatcc

SEQ ID NO: 995 - RNA, 16 nt, synthetic construct
  source 1..16: mol_type = other RNA; note = Antisense oligonucleotide
  modified_base 1: mod_base = OTHER; note = thymine; note = backbone modification: 5'-phosphorothioate; note = sugar modification: lna
  modified_base 2: mod_base = OTHER; note = sugar modification: lna; note = thymine; note = backbone modification: 5'-phosphorothioate
  modified_base 3: mod_base = m5c; mod_base = OTHER; note = sugar modification: lna; note = backbone modification: 5'-phosphorothioate
  modified_base 4: mod_base = OTHER; note = sugar modification: lna; note = backbone modification: 5'-phosphorothioate; note = thymine
  modified_base 5: mod_base = OTHER; note = thymine; note = sugar modification: 2'-O-methoxyethylribose; note = backbone modification: 5'-phosphorothioate
  modified_base 6: mod_base = OTHER; note = sugar modification: 2'-O-methoxyethylribose; note = backbone modification: 5'-phosphorothioate
  modified_base 7: mod_base = OTHER; note = backbone modification: 5'-phosphorothioate; note = sugar modification: 2'-O-methoxyethylribose; note = thymine
  modified_base 8: mod_base = OTHER; note = sugar modification: 2'-O-methoxyethylribose; note = backbone modification: 5'-phosphorothioate
  modified_base 9: mod_base = m5c; mod_base = OTHER; note = sugar modification: 2'-O-methoxyethylribose; note = backbone modification: 5'-phosphorothioate
  modified_base 10: mod_base = OTHER; note = sugar modification: 2'-O-methoxyethylribose; note = thymine; note = backbone modification: 5'-phosphorothioate
  modified_base 11: mod_base = OTHER; note = thymine; note = sugar modification: 2'-O-methoxyethylribose; note = backbone modification: 5'-phosphorothioate
  modified_base 12: mod_base = m5c; mod_base = OTHER; note = backbone modification: 5'-phosphorothioate; note = sugar modification: 2'-O-methoxyethylribose
  modified_base 13: mod_base = OTHER; note = sugar modification: 2'-O-methoxyethylribose; note = backbone modification: 5'-phosphorothioate
  modified_base 14: mod_base = OTHER; note = sugar modification: lna; note = thymine; note = backbone modification: 5'-phosphorothioate
  modified_base 15: mod_base = OTHER; mod_base = m5c; note = backbone modification: 5'-phosphorothioate; note = sugar modification: lna
  modified_base 16: mod_base = OTHER; mod_base = m5c; note = sugar modification: lna
ttcttgtacttcatcc

SEQ ID NO: 996 - RNA, 16 nt, synthetic construct
  source 1..16: mol_type = other RNA; note = Antisense oligonucleotide
  modified_base 1: mod_base = OTHER; note = thymine; note = backbone modification: 5'-phosphorothioate; note = sugar modification: lna
  modified_base 2: mod_base = OTHER; note = sugar modification: lna; note = thymine; note = backbone modification: 5'-phosphorothioate
  modified_base 3: mod_base = OTHER; mod_base = m5c; note = sugar modification: 2'-O-methoxyethylribose; note = backbone modification: 5'-phosphorothioate
  modified_base 4: mod_base = OTHER; note = sugar modification: 2'-O-methoxyethylribose; note = thymine; note = backbone modification: 5'-phosphorothioate
  modified_base 5: mod_base = OTHER; note = thymine; note = sugar modification: 2'-O-methoxyethylribose; note = backbone modification: 5'-phosphorothioate
  modified_base 6: mod_base = OTHER; note = sugar modification: 2'-O-methoxyethylribose; note = backbone modification: 5'-phosphorothioate
  modified_base 7: mod_base = OTHER; note = thymine; note = backbone modification: 5'-phosphorothioate; note = sugar modification: 2'-O-methoxyethylribose
  modified_base 8: mod_base = OTHER; note = backbone modification: 5'-phosphorothioate; note = sugar modification: 2'-O-methoxyethylribose
  modified_base 9: mod_base = OTHER; mod_base = m5c; note = backbone modification: 5'-phosphorothioate; note = sugar modification: 2'-O-methoxyethylribose
  modified_base 10: mod_base = OTHER; note = backbone modification: 5'-phosphorothioate; note = sugar modification: 2'-O-methoxyethylribose; note = thymine
  modified_base 11: mod_base = OTHER; note = thymine; note = sugar modification: 2'-O-methoxyethylribose; note = backbone modification: 5'-phosphorothioate
  modified_base 12: mod_base = m5c; mod_base = OTHER; note = backbone modification: 5'-phosphorothioate; note = sugar modification: 2'-O-methoxyethylribose
  modified_base 13: mod_base = OTHER; note = backbone modification: 5'-phosphorothioate; note = sugar modification: lna
  modified_base 14: mod_base = OTHER; note = thymine; note = backbone modification: 5'-phosphorothioate; note = sugar modification: lna
  modified_base 15: mod_base = m5c; mod_base = OTHER; note = backbone modification: 5'-phosphorothioate; note = sugar modification: lna
  modified_base 16: mod_base = OTHER; mod_base = m5c; note = sugar modification: lna
ttcttgtacttcatcc

SEQ ID NO: 997 - RNA, 16 nt, synthetic construct
  source 1..16: mol_type = other RNA; note = Antisense oligonucleotide
  modified_base 1: mod_base = OTHER; note = thymine; note = backbone modification: 5'-phosphorothioate; note = sugar modification: lna
  modified_base 2: mod_base = OTHER; note = sugar modification: lna; note = thymine; note = backbone modification: 5'-phosphorothioate
  modified_base 3: mod_base = m5c; mod_base = OTHER; note = sugar modification: lna; note = backbone modification: 5'-phosphorothioate
  modified_base 4: mod_base = OTHER; note = thymine; note = sugar modification: 2'-O-methoxyethylribose; note = backbone modification: 5'-phosphorothioate
  modified_base 5: mod_base = OTHER; note = sugar modification: 2'-O-methoxyethylribose; note = backbone modification: 5'-phosphorothioate; note = thymine
  modified_base 6: mod_base = OTHER; note = backbone modification: 5'-phosphorothioate; note = sugar modification: 2'-O-methoxyethylribose
  modified_base 7: mod_base = OTHER; note = backbone modification: 5'-phosphorothioate; note = sugar modification: 2'-O-methoxyethylribose; note = thymine
  modified_base 8: mod_base = OTHER; note = backbone modification: 5'-phosphorothioate; note = sugar modification: 2'-O-methoxyethylribose
  modified_base 9: mod_base = OTHER; mod_base = m5c; note = backbone modification: 5'-phosphorothioate; note = sugar modification: 2'-O-methoxyethylribose
  modified_base 10: mod_base = OTHER; note = sugar modification: 2'-O-methoxyethylribose; note = backbone modification: 5'-phosphorothioate; note = thymine
  modified_base 11: mod_base = OTHER; note = thymine; note = backbone modification: 5'-phosphorothioate; note = sugar modification: 2'-O-methoxyethylribose
  modified_base 12: mod_base = m5c; mod_base = OTHER; note = sugar modification: 2'-O-methoxyethylribose; note = backbone modification: 5'-phosphorothioate
  modified_base 13: mod_base = OTHER; note = backbone modification: 5'-phosphorothioate; note = sugar modification: lna
  modified_base 14: mod_base = OTHER; note = thymine; note = sugar modification: lna; note = backbone modification: 5'-phosphorothioate
  modified_base 15: mod_base = OTHER; mod_base = m5c; note = sugar modification: lna; note = backbone modification: 5'-phosphorothioate
  modified_base 16: mod_base = m5c; mod_base = OTHER; note = sugar modification: lna
ttcttgtacttcatcc

SEQ ID NO: 998 - RNA, 16 nt, synthetic construct
  source 1..16: mol_type = other RNA; note = Antisense oligonucleotide
  modified_base 1: mod_base = OTHER; note = backbone modification: 5'-phosphorothioate; note = sugar modification: lna; note = thymine
  modified_base 2: mod_base = OTHER; note = backbone modification: 5'-phosphorothioate; note = sugar modification: lna; note = thymine
  modified_base 3: mod_base = OTHER; mod_base = m5c; note = backbone modification: 5'-phosphorothioate; note = sugar modification: lna
  modified_base 4: mod_base = OTHER; note = sugar modification: lna; note = thymine; note = backbone modification: 5'-phosphorothioate
  modified_base 5: mod_base = OTHER; note = sugar modification: 2'-O-methoxyethylribose; note = backbone modification: 5'-phosphorothioate; note = thymine
  modified_base 6: mod_base = OTHER; note = backbone modification: 5'-phosphorothioate; note = sugar modification: 2'-O-methoxyethylribose
  modified_base 7: mod_base = OTHER; note = backbone modification: 5'-phosphorothioate; note = sugar modification: 2'-O-methoxyethylribose; note = thymine
  modified_base 8: mod_base = OTHER; note = sugar modification: 2'-O-methoxyethylribose; note = backbone modification: 5'-phosphorothioate
  modified_base 9: mod_base = m5c; mod_base = OTHER; note = backbone modification: 5'-phosphorothioate; note = sugar modification: 2'-O-methoxyethylribose
  modified_base 10: mod_base = OTHER; note = sugar modification: 2'-O-methoxyethylribose; note = backbone modification: 5'-phosphorothioate; note = thymine
  modified_base 11: mod_base = OTHER; note = thymine; note = backbone modification: 5'-phosphorothioate; note = sugar modification: 2'-O-methoxyethylribose
  modified_base 12: mod_base = OTHER; mod_base = m5c; note = sugar modification: 2'-O-methoxyethylribose; note = backbone modification: 5'-phosphorothioate
  modified_base 13: mod_base = OTHER; note = sugar modification: lna; note = backbone modification: 5'-phosphorothioate
  modified_base 14: mod_base = OTHER; note = thymine; note = backbone modification: 5'-phosphorothioate; note = sugar modification: lna
  modified_base 15: mod_base = OTHER; mod_base = m5c; note = backbone modification: 5'-phosphorothioate; note = sugar modification: lna
  modified_base 16: mod_base = OTHER; mod_base = m5c; note = sugar modification: lna
ttcttgtacttcatcc

SEQ ID NO: 999 - RNA, 16 nt, synthetic construct
  source 1..16: mol_type = other RNA; note = Antisense oligonucleotide
  modified_base 1: mod_base = OTHER; note = backbone modification: 5'-phosphorothioate; note = thymine; note = sugar modification: lna
  modified_base 2: mod_base = OTHER; note = backbone modification: 5'-phosphorothioate; note = thymine; note = sugar modification: lna
  modified_base 3: mod_base = m5c; mod_base = OTHER; note = sugar modification: lna; note = backbone modification: 5'-phosphorothioate
  modified_base 4: mod_base = OTHER; note = thymine; note = backbone modification: 5'-phosphorothioate; note = sugar modification: lna
  modified_base 5: mod_base = OTHER; note = backbone modification: 5'-phosphorothioate; note = thymine; note = sugar modification: lna
  modified_base 6: mod_base = OTHER; note = sugar modification: 2'-O-methoxyethylribose; note = backbone modification: 5'-phosphorothioate
  modified_base 7: mod_base = OTHER; note = sugar modification: 2'-O-methoxyethylribose; note = thymine; note = backbone modification: 5'-phosphorothioate
  modified_base 8: mod_base = OTHER; note = sugar modification: 2'-O-methoxyethylribose; note = backbone modification: 5'-phosphorothioate
  modified_base 9: mod_base = OTHER; mod_base = m5c; note = sugar modification: 2'-O-methoxyethylribose; note = backbone modification: 5'-phosphorothioate
  modified_base 10: mod_base = OTHER; note = backbone modification: 5'-phosphorothioate; note = thymine; note = sugar modification: 2'-O-methoxyethylribose
  modified_base 11: mod_base = OTHER; note = backbone modification: 5'-phosphorothioate; note = thymine; note = sugar modification: 2'-O-methoxyethylribose
  modified_base 12: mod_base = OTHER; mod_base = m5c; note = backbone modification: 5'-phosphorothioate; note = sugar modification: lna
  modified_base 13: mod_base = OTHER; note = sugar modification: lna; note = backbone modification: 5'-phosphorothioate
  modified_base 14: mod_base = OTHER; note = thymine; note = backbone modification: 5'-phosphorothioate; note = sugar modification: lna
  modified_base 15: mod_base = m5c; mod_base = OTHER; note = sugar modification: lna; note = backbone modification: 5'-phosphorothioate
  modified_base 16: mod_base = OTHER; mod_base = m5c; note = sugar modification: lna
ttcttgtacttcatcc

SEQ ID NO: 1000 - RNA, 16 nt, synthetic construct
  source 1..16: mol_type = other RNA; note = Antisense oligonucleotide
  modified_base 1: mod_base = OTHER; note = thymine; note = sugar modification: 2'-O-methoxyethylribose; note = backbone modification: 5'-phosphorothioate
  modified_base 2: mod_base = OTHER; note = sugar modification: 2'-O-methoxyethylribose; note = thymine; note = backbone modification: 5'-phosphorothioate
  modified_base 3: mod_base = m5c; mod_base = OTHER; note = sugar modification: 2'-O-methoxyethylribose; note = backbone modification: 5'-phosphorothioate
  modified_base 4: mod_base = OTHER; note = backbone modification: 5'-phosphorothioate; note = thymine; note = sugar modification: 2'-O-methoxyethylribose
  modified_base 5: mod_base = OTHER; note = backbone modification: 5'-phosphorothioate; note = sugar modification: 2'-O-methoxyethylribose; note = thymine
  modified_base 6: mod_base = OTHER; note = sugar modification: 2'-O-methoxyethylribose; note = backbone modification: 5'-phosphorothioate
  modified_base 7: mod_base = OTHER; note = sugar modification: 2'-O-methoxyethylribose; note = backbone modification: 5'-phosphorothioate; note = thymine
  modified_base 8: mod_base = OTHER; note = backbone modification: 5'-phosphorothioate; note = sugar modification: 2'-O-methoxyethylribose
  modified_base 9: mod_base = OTHER; mod_base = m5c; note = backbone modification: 5'-phosphorothioate; note = sugar modification: 2'-O-methoxyethylribose
  modified_base 10: mod_base = OTHER; note = thymine; note = sugar modification: 2'-O-methoxyethylribose; note = backbone modification: 5'-phosphorothioate
  modified_base 11: mod_base = OTHER; note = sugar modification: 2'-O-methoxyethylribose; note = thymine; note = backbone modification: 5'-phosphorothioate
  modified_base 12: mod_base = OTHER; mod_base = m5c; note = sugar modification: 2'-O-methoxyethylribose; note = backbone modification: 5'-phosphorothioate
  modified_base 13: mod_base = OTHER; note = backbone modification: 5'-phosphorothioate; note = sugar modification: 2'-O-methoxyethylribose
  modified_base 14: mod_base = OTHER; note = thymine; note = backbone modification: 5'-phosphorothioate; note = sugar modification: 2'-O-methoxyethylribose
  modified_base 15: mod_base = m5c; mod_base = OTHER; note = sugar modification: 2'-O-methoxyethylribose; note = backbone modification: 5'-phosphorothioate
  modified_base 16: mod_base = OTHER; mod_base = m5c; note = sugar modification: lna
ttcttgtacttcatcc

SEQ ID NO: 1001 - RNA, 16 nt, synthetic construct
  source 1..16: mol_type = other RNA; note = Antisense oligonucleotide
  modified_base 1: mod_base = OTHER; note = backbone modification: 5'-phosphorothioate; note = thymine; note = sugar modification: 2'-O-methoxyethylribose
  modified_base 2: mod_base = OTHER; note = thymine; note = backbone modification: 5'-phosphorothioate; note = sugar modification: 2'-O-methoxyethylribose
  modified_base 3: mod_base = m5c; mod_base = OTHER; note = backbone modification: 5'-phosphorothioate; note = sugar modification: 2'-O-methoxyethylribose
  modified_base 4: mod_base = OTHER; note = thymine; note = backbone modification: 5'-phosphorothioate; note = sugar modification: 2'-O-methoxyethylribose
  modified_base 5: mod_base = OTHER; note = backbone modification: 5'-phosphorothioate; note = thymine; note = sugar modification: 2'-O-methoxyethylribose
  modified_base 6: mod_base = OTHER; note = sugar modification: 2'-O-methoxyethylribose; note = backbone modification: 5'-phosphorothioate
  modified_base 7: mod_base = OTHER; note = thymine; note = sugar modification: 2'-O-methoxyethylribose; note = backbone modification: 5'-phosphorothioate
  modified_base 8: mod_base = OTHER; note = sugar modification: 2'-O-methoxyethylribose; note = backbone modification: 5'-phosphorothioate
  modified_base 9: mod_base = m5c; mod_base = OTHER; note = sugar modification: 2'-O-methoxyethylribose; note = backbone modification: 5'-phosphorothioate
  modified_base 10: mod_base = OTHER; note = thymine; note = sugar modification: 2'-O-methoxyethylribose; note = backbone modification: 5'-phosphorothioate
  modified_base 11: mod_base = OTHER; note = backbone modification: 5'-phosphorothioate; note = sugar modification: 2'-O-methoxyethylribose; note = thymine
  modified_base 12: mod_base = m5c; mod_base = OTHER; note = sugar modification: 2'-O-methoxyethylribose; note = backbone modification: 5'-phosphorothioate
  modified_base 13: mod_base = OTHER; note = sugar modification: 2'-O-methoxyethylribose; note = backbone modification: 5'-phosphorothioate
  modified_base 14: mod_base = OTHER; note = thymine; note = sugar modification: 2'-O-methoxyethylribose; note = backbone modification: 5'-phosphorothioate
  modified_base 15: mod_base = OTHER; mod_base = m5c; note = backbone modification: 5'-phosphorothioate; note = sugar modification: lna
  modified_base 16: mod_base = m5c; mod_base = OTHER; note = sugar modification: lna
ttcttgtacttcatcc

SEQ ID NO: 1002 - RNA, 16 nt, synthetic construct
  source 1..16: mol_type = other RNA; note = Antisense oligonucleotide
  modified_base 1: mod_base = OTHER; note = sugar modification: 2'-O-methoxyethylribose; note = backbone modification: 5'-phosphorothioate; note = thymine
  modified_base 2: mod_base = OTHER; note = thymine; note = sugar modification: 2'-O-methoxyethylribose; note = backbone modification: 5'-phosphorothioate
  modified_base 3: mod_base = m5c; mod_base = OTHER; note = sugar modification: 2'-O-methoxyethylribose; note = backbone modification: 5'-phosphorothioate
  modified_base 4: mod_base = OTHER; note = thymine; note = backbone modification: 5'-phosphorothioate; note = sugar modification: 2'-O-methoxyethylribose
  modified_base 5: mod_base = OTHER; note = backbone modification: 5'-phosphorothioate; note = sugar modification: 2'-O-methoxyethylribose; note = thymine
  modified_base 6: mod_base = OTHER; note = backbone modification: 5'-phosphorothioate; note = sugar modification: 2'-O-methoxyethylribose
  modified_base 7: mod_base = OTHER; note = sugar modification: 2'-O-methoxyethylribose; note = thymine; note = backbone modification: 5'-phosphorothioate
  modified_base 8: mod_base = OTHER; note = sugar modification: 2'-O-methoxyethylribose; note = backbone modification: 5'-phosphorothioate
  modified_base 9: mod_base = m5c; mod_base = OTHER; note = backbone modification: 5'-phosphorothioate; note = sugar modification: 2'-O-methoxyethylribose
  modified_base 10: mod_base = OTHER; note = thymine; note = backbone modification: 5'-phosphorothioate; note = sugar modification: 2'-O-methoxyethylribose
  modified_base 11: mod_base = OTHER; note = backbone modification: 5'-phosphorothioate; note = sugar modification: 2'-O-methoxyethylribose; note = thymine
  modified_base 12: mod_base = OTHER; mod_base = m5c; note = sugar modification: 2'-O-methoxyethylribose; note = backbone modification: 5'-phosphorothioate
  modified_base 13: mod_base = OTHER; note = backbone modification: 5'-phosphorothioate; note = sugar modification: 2'-O-methoxyethylribose
  modified_base 14: mod_base = OTHER; note = backbone modification: 5'-phosphorothioate; note = sugar modification: lna; note = thymine
  modified_base 15: mod_base = OTHER; mod_base = m5c; note = sugar modification: lna; note = backbone modification: 5'-phosphorothioate
  modified_base 16: mod_base = OTHER; mod_base = m5c; note = sugar modification: lna
ttcttgtacttcatcc

SEQ ID NO: 1003 - RNA, 16 nt, synthetic construct
  source 1..16: mol_type = other RNA; note = Antisense oligonucleotide
  modified_base 1: mod_base = OTHER; note = backbone modification: 5'-phosphorothioate; note = sugar modification: lna
  modified_base 2: mod_base = OTHER; note = backbone modification: 5'-phosphorothioate; note = thymine; note = sugar modification: lna
  modified_base 3: mod_base = OTHER; note = thymine; note = backbone modification: 5'-phosphorothioate; note = sugar modification: 2'-O-methoxyethylribose
  modified_base 4: mod_base = OTHER; mod_base = m5c; note = backbone modification: 5'-phosphorothioate; note = sugar modification: 2'-O-methoxyethylribose
  modified_base 5: mod_base = OTHER; note = thymine; note = backbone modification: 5'-phosphorothioate; note = sugar modification: 2'-O-methoxyethylribose
  modified_base 6: mod_base = OTHER; note = thymine; note = sugar modification: 2'-O-methoxyethylribose; note = backbone modification: 5'-phosphorothioate
  modified_base 7: mod_base = OTHER; note = backbone modification: 5'-phosphorothioate; note = sugar modification: 2'-O-methoxyethylribose
  modified_base 8: mod_base = OTHER; note = thymine; note = backbone modification: 5'-phosphorothioate; note = sugar modification: 2'-O-methoxyethylribose
  modified_base 9: mod_base = OTHER; note = backbone modification: 5'-phosphorothioate; note = sugar modification: 2'-O-methoxyethylribose
  modified_base 10: mod_base = m5c; mod_base = OTHER; note = backbone modification: 5'-phosphorothioate; note = sugar modification: 2'-O-methoxyethylribose
  modified_base 11: mod_base = OTHER; note = backbone modification: 5'-phosphorothioate; note = thymine; note = sugar modification: 2'-O-methoxyethylribose
  modified_base 12: mod_base = OTHER; note = backbone modification: 5'-phosphorothioate; note = sugar modification: 2'-O-methoxyethylribose; note = thymine
  modified_base 13: mod_base = OTHER; mod_base = m5c; note = sugar modification: 2'-O-methoxyethylribose; note = backbone modification: 5'-phosphorothioate
  modified_base 14: mod_base = OTHER; note = backbone modification: 5'-phosphorothioate; note = sugar modification: 2'-O-methoxyethylribose
  modified_base 15: mod_base = OTHER; note = backbone modification: 5'-phosphorothioate; note = thymine; note = sugar modification: lna
  modified_base 16: mod_base = OTHER; mod_base = m5c; note = sugar modification: lna
gttcttgtacttcatc

SEQ ID NO: 1004 - RNA, 16 nt, synthetic construct
  source 1..16: mol_type = other RNA; note = Antisense oligonucleotide
  modified_base 1: mod_base = OTHER; note = sugar modification: lna; note = backbone modification: 5'-phosphorothioate
  modified_base 2: mod_base = OTHER; note = backbone modification: 5'-phosphorothioate; note = thymine; note = sugar modification: 2'-O-methoxyethylribose
  modified_base 3: mod_base = OTHER; note = sugar modification: 2'-O-methoxyethylribose; note = backbone modification: 5'-phosphorothioate; note = thymine
  modified_base 4: mod_base = m5c; mod_base = OTHER; note = sugar modification: 2'-O-methoxyethylribose; note = backbone modification: 5'-phosphorothioate
  modified_base 5: mod_base = OTHER; note = backbone modification: 5'-phosphorothioate; note = sugar modification: 2'-O-methoxyethylribose; note = thymine
  modified_base 6: mod_base = OTHER; note = thymine; note = sugar modification: 2'-O-methoxyethylribose; note = backbone modification: 5'-phosphorothioate
  modified_base 7: mod_base = OTHER; note = backbone modification: 5'-phosphorothioate; note = sugar modification: 2'-O-methoxyethylribose
  modified_base 8: mod_base = OTHER; note = backbone modification: 5'-phosphorothioate; note = thymine; note = sugar modification: 2'-O-methoxyethylribose
  modified_base 9: mod_base = OTHER; note = backbone modification: 5'-phosphorothioate; note = sugar modification: 2'-O-methoxyethylribose
  modified_base 10: mod_base = m5c; mod_base = OTHER; note = backbone modification: 5'-phosphorothioate; note = sugar modification: 2'-O-methoxyethylribose
  modified_base 11: mod_base = OTHER; note = backbone modification: 5'-phosphorothioate; note = thymine; note = sugar modification: 2'-O-methoxyethylribose
  modified_base 12: mod_base = OTHER; note = backbone modification: 5'-phosphorothioate; note = thymine; note = sugar modification: 2'-O-methoxyethylribose
  modified_base 13: mod_base = OTHER; mod_base = m5c; note = backbone modification: 5'-phosphorothioate; note = sugar modification: 2'-O-methoxyethylribose
  modified_base 14: mod_base = OTHER; note = sugar modification: 2'-O-methoxyethylribose; note = backbone modification: 5'-phosphorothioate
  modified_base 15: mod_base = OTHER; note = thymine; note = backbone modification: 5'-phosphorothioate; note = sugar modification: 2'-O-methoxyethylribose
  modified_base 16: mod_base = m5c; mod_base = OTHER; note = sugar modification: 2'-O-methoxyethylribose
gttcttgtacttcatc

SEQ ID NO: 1005 - RNA, 16 nt, synthetic construct
  source 1..16: mol_type = other RNA; note = Antisense oligonucleotide
  modified_base 1: mod_base = OTHER; note = sugar modification: lna; note = backbone modification: 5'-phosphorothioate
  modified_base 2: mod_base = OTHER; note = thymine; note = backbone modification: 5'-phosphorothioate; note = sugar modification: lna
  modified_base 3: mod_base = OTHER; note = sugar modification: 2'-O-methoxyethylribose; note = backbone modification: 5'-phosphorothioate; note = thymine
  modified_base 4: mod_base = m5c; mod_base = OTHER; note = sugar modification: 2'-O-methoxyethylribose; note = backbone modification: 5'-phosphorothioate
  modified_base 5: mod_base = OTHER; note = backbone modification: 5'-phosphorothioate; note = thymine; note = sugar modification: 2'-O-methoxyethylribose
  modified_base 6: mod_base = OTHER; note = thymine; note = backbone modification: 5'-phosphorothioate; note = sugar modification: 2'-O-methoxyethylribose
  modified_base 7: mod_base = OTHER; note = backbone modification: 5'-phosphorothioate; note = sugar modification: 2'-O-methoxyethylribose
  modified_base 8: mod_base = OTHER; note = sugar modification: 2'-O-methoxyethylribose; note = backbone modification: 5'-phosphorothioate; note = thymine
  modified_base 9: mod_base = OTHER; note = sugar modification: 2'-O-methoxyethylribose; note = backbone modification: 5'-phosphorothioate
  modified_base 10: mod_base = OTHER; mod_base = m5c; note = sugar modification: 2'-O-methoxyethylribose; note = backbone modification: 5'-phosphorothioate
  modified_base 11: mod_base = OTHER; note = sugar modification: 2'-O-methoxyethylribose; note = thymine; note = backbone modification: 5'-phosphorothioate
  modified_base 12: mod_base = OTHER; note = backbone modification: 5'-phosphorothioate; note = sugar modification: 2'-O-methoxyethylribose; note = thymine
  modified_base 13: mod_base = OTHER; mod_base = m5c; note = sugar modification: 2'-O-methoxyethylribose; note = backbone modification: 5'-phosphorothioate
  modified_base 14: mod_base = OTHER; note = sugar modification: 2'-O-methoxyethylribose; note = backbone modification: 5'-phosphorothioate
  modified_base 15: mod_base = OTHER; note = backbone modification: 5'-phosphorothioate; note = thymine; note = sugar modification: 2'-O-methoxyethylribose
  modified_base 16: mod_base = m5c; mod_base = OTHER; note = sugar modification: 2'-O-methoxyethylribose
gttcttgtacttcatc

SEQ ID NO: 1006 - RNA, 16 nt, synthetic construct
  source 1..16: mol_type = other RNA; note = Antisense oligonucleotide
  modified_base 1: mod_base = OTHER; note = backbone modification: 5'-phosphorothioate; note = sugar modification: lna
  modified_base 2: mod_base = OTHER; note = thymine; note = backbone modification: 5'-phosphorothioate; note = sugar modification: lna
  modified_base 3: mod_base = OTHER; note = sugar modification: lna; note = backbone modification: 5'-phosphorothioate; note = thymine
  modified_base 4: mod_base = m5c; mod_base = OTHER; note = sugar modification: 2'-O-methoxyethylribose; note = backbone modification: 5'-phosphorothioate
  modified_base 5: mod_base = OTHER; note = backbone modification: 5'-phosphorothioate; note = thymine; note = sugar modification: 2'-O-methoxyethylribose
  modified_base 6: mod_base = OTHER; note = backbone modification: 5'-phosphorothioate; note = thymine; note = sugar modification: 2'-O-methoxyethylribose
  modified_base 7: mod_base = OTHER; note = sugar modification: 2'-O-methoxyethylribose; note = backbone modification: 5'-phosphorothioate
  modified_base 8: mod_base = OTHER; note = backbone modification: 5'-phosphorothioate; note = sugar modification: 2'-O-methoxyethylribose; note = thymine
  modified_base 9: mod_base = OTHER; note = sugar modification: 2'-O-methoxyethylribose; note = backbone modification: 5'-phosphorothioate
  modified_base 10: mod_base = m5c; mod_base = OTHER; note = sugar modification: 2'-O-methoxyethylribose; note = backbone modification: 5'-phosphorothioate
  modified_base 11: mod_base = OTHER; note = sugar modification: 2'-O-methoxyethylribose; note = thymine; note = backbone modification: 5'-phosphorothioate
  modified_base 12: mod_base = OTHER; note = backbone modification: 5'-phosphorothioate; note = thymine; note = sugar modification: 2'-O-methoxyethylribose
  modified_base 13: mod_base = m5c; mod_base = OTHER; note = sugar modification: 2'-O-methoxyethylribose; note = backbone modification: 5'-phosphorothioate
  modified_base 14: mod_base = OTHER; note = sugar modification: 2'-O-methoxyethylribose; note = backbone modification: 5'-phosphorothioate
  modified_base 15: mod_base = OTHER; note = sugar modification: 2'-O-methoxyethylribose; note = backbone modification: 5'-phosphorothioate; note = thymine
  modified_base 16: mod_base = OTHER; mod_base = m5c; note = sugar modification: 2'-O-methoxyethylribose
gttcttgtacttcatc

SEQ ID NO: 1007 - RNA, 16 nt, synthetic construct
  source 1..16: mol_type = other RNA; note = Antisense oligonucleotide
  modified_base 1: mod_base = OTHER; note = backbone modification: 5'-phosphorothioate; note = sugar modification: lna
  modified_base 2: mod_base = OTHER; note = sugar modification: lna; note = thymine; note = backbone modification: 5'-phosphorothioate
  modified_base 3: mod_base = OTHER; note = thymine; note = backbone modification: 5'-phosphorothioate; note = sugar modification: 2'-O-methoxyethylribose
  modified_base 4: mod_base = OTHER; mod_base = m5c; note = sugar modification: 2'-O-methoxyethylribose; note = backbone modification: 5'-phosphorothioate
  modified_base 5: mod_base = OTHER; note = backbone modification: 5'-phosphorothioate; note = thymine; note = sugar modification: 2'-O-methoxyethylribose
  modified_base 6: mod_base = OTHER; note = sugar modification: 2'-O-methoxyethylribose; note = thymine; note = backbone modification: 5'-phosphorothioate
  modified_base 7: mod_base = OTHER; note = backbone modification: 5'-phosphorothioate; note = sugar modification: 2'-O-methoxyethylribose
  modified_base 8: mod_base = OTHER; note = backbone modification: 5'-phosphorothioate; note = thymine; note = sugar modification: 2'-O-methoxyethylribose
  modified_base 9: mod_base = OTHER; note = backbone modification: 5'-phosphorothioate; note = sugar modification: 2'-O-methoxyethylribose
  modified_base 10: mod_base = m5c; mod_base = OTHER; note = backbone modification: 5'-phosphorothioate; note = sugar modification: 2'-O-methoxyethylribose
  modified_base 11: mod_base = OTHER; note = backbone modification: 5'-phosphorothioate; note = thymine; note = sugar modification: 2'-O-methoxyethylribose
  modified_base 12: mod_base = OTHER; note = thymine; note = backbone modification: 5'-phosphorothioate; note = sugar modification: 2'-O-methoxyethylribose
  modified_base 13: mod_base = OTHER; mod_base = m5c; note = sugar modification: 2'-O-methoxyethylribose; note = backbone modification: 5'-phosphorothioate
  modified_base 14: mod_base = OTHER; note = backbone modification: 5'-phosphorothioate; note = sugar modification: 2'-O-methoxyethylribose
  modified_base 15: mod_base = OTHER; note = backbone modification: 5'-phosphorothioate; note = thymine; note = sugar modification: 2'-O-methoxyethylribose
  modified_base 16: mod_base = OTHER; mod_base = m5c; note = sugar modification: lna
gttcttgtacttcatc

SEQ ID NO: 1008 - RNA, 16 nt, synthetic construct
  source 1..16: mol_type = other RNA; note = Antisense oligonucleotide
  modified_base 1: mod_base = OTHER; note = backbone modification: 5'-phosphorothioate; note = sugar modification: lna
  modified_base 2: mod_base = OTHER; note = thymine; note = sugar modification: lna; note = backbone modification: 5'-phosphorothioate
  modified_base 3: mod_base = OTHER; note = sugar modification: lna; note = backbone modification: 5'-phosphorothioate; note = thymine
  modified_base 4: mod_base = OTHER; mod_base = m5c; note = backbone modification: 5'-phosphorothioate; note = sugar modification: 2'-O-methoxyethylribose
  modified_base 5: mod_base = OTHER; note = sugar modification: 2'-O-methoxyethylribose; note = backbone modification: 5'-phosphorothioate; note = thymine
  modified_base 6: mod_base = OTHER; note = sugar modification: 2'-O-methoxyethylribose; note = thymine; note = backbone modification: 5'-phosphorothioate
  modified_base 7: mod_base = OTHER; note = backbone modification: 5'-phosphorothioate; note = sugar modification: 2'-O-methoxyethylribose
  modified_base 8: mod_base = OTHER; note = thymine; note = backbone modification: 5'-phosphorothioate; note = sugar modification: 2'-O-methoxyethylribose
  modified_base 9: mod_base = OTHER; note = backbone modification: 5'-phosphorothioate; note = sugar modification: 2'-O-methoxyethylribose
  modified_base 10: mod_base = OTHER; mod_base = m5c; note = backbone modification: 5'-phosphorothioate; note = sugar modification: 2'-O-methoxyethylribose
  modified_base 11: mod_base = OTHER; note = thymine; note = sugar modification: 2'-O-methoxyethylribose; note = backbone modification: 5'-phosphorothioate
  modified_base 12: mod_base = OTHER; note = thymine; note = backbone modification: 5'-phosphorothioate; note = sugar modification: 2'-O-methoxyethylribose
  modified_base 13: mod_base = OTHER; mod_base = m5c; note = sugar modification: 2'-O-methoxyethylribose; note = backbone modification: 5'-phosphorothioate
  modified_base 14: mod_base = OTHER; note = backbone modification: 5'-phosphorothioate; note = sugar modification: 2'-O-methoxyethylribose
  modified_base 15: mod_base = OTHER; note = sugar modification: 2'-O-methoxyethylribose; note = thymine; note = backbone modification: 5'-phosphorothioate
  modified_base 16: mod_base = OTHER; mod_base = m5c; note = sugar modification: lna
gttcttgtacttcatc

SEQ ID NO: 1009 - RNA, 16 nt, synthetic construct
  source 1..16: mol_type = other RNA; note = Antisense oligonucleotide
  modified_base 1: mod_base = OTHER; note = backbone modification: 5'-phosphorothioate; note = sugar modification: lna
  modified_base 2: mod_base = OTHER; note = thymine; note = sugar modification: 2'-O-methoxyethylribose; note = backbone modification: 5'-phosphorothioate
  modified_base 3: mod_base = OTHER; note = thymine; note = backbone modification: 5'-phosphorothioate; note = sugar modification: 2'-O-methoxyethylribose
  modified_base 4: mod_base = OTHER; mod_base = m5c; note = backbone modification: 5'-phosphorothioate; note = sugar modification: 2'-O-methoxyethylribose
  modified_base 5: mod_base = OTHER; note = backbone modification: 5'-phosphorothioate; note = thymine; note = sugar modification: 2'-O-methoxyethylribose
  modified_base 6: mod_base = OTHER; note = sugar modification: 2'-O-methoxyethylribose; note = thymine; note = backbone modification: 5'-phosphorothioate
  modified_base 7: mod_base = OTHER; note = sugar modification: 2'-O-methoxyethylribose; note = backbone modification: 5'-phosphorothioate
  modified_base 8: mod_base = OTHER; note = thymine; note = sugar modification: 2'-O-methoxyethylribose; note = backbone modification: 5'-phosphorothioate
  modified_base 9: mod_base = OTHER; note = backbone modification: 5'-phosphorothioate; note = sugar modification: 2'-O-methoxyethylribose
  modified_base 10: mod_base = m5c; mod_base = OTHER; note = backbone modification: 5'-phosphorothioate; note = sugar modification: 2'-O-methoxyethylribose
  modified_base 11: mod_base = OTHER; note = backbone modification: 5'-phosphorothioate; note = thymine; note = sugar modification: 2'-O-methoxyethylribose
  modified_base 12: mod_base = OTHER; note = backbone modification: 5'-phosphorothioate; note = sugar modification: 2'-O-methoxyethylribose; note = thymine
  modified_base 13: mod_base = OTHER; mod_base = m5c; note = sugar modification: 2'-O-methoxyethylribose; note = backbone modification: 5'-phosphorothioate
  modified_base 14: mod_base = OTHER; note = backbone modification: 5'-phosphorothioate; note = sugar modification: 2'-O-methoxyethylribose
  modified_base 15: mod_base = OTHER; note = sugar modification: lna; note = backbone modification: 5'-phosphorothioate; note = thymine
  modified_base 16: mod_base = m5c; mod_base = OTHER; note = sugar modification: lna
gttcttgtacttcatc

SEQ ID NO: 1010 - RNA, 16 nt, synthetic construct
  source 1..16: mol_type = other RNA; note = Antisense oligonucleotide
  modified_base 1: mod_base = OTHER; note = backbone modification: 5'-phosphorothioate; note = sugar modification: lna
  modified_base 2: mod_base = OTHER; note = backbone modification: 5'-phosphorothioate; note = sugar modification: lna; note = thymine
  modified_base 3: mod_base = OTHER; note = thymine; note = sugar modification: lna; note = backbone modification: 5'-phosphorothioate
  modified_base 4: mod_base = OTHER; mod_base = m5c; note = sugar modification: 2'-O-methoxyethylribose; note = backbone modification: 5'-phosphorothioate
  modified_base 5: mod_base = OTHER; note = sugar modification: 2'-O-methoxyethylribose; note = backbone modification: 5'-phosphorothioate; note = thymine
  modified_base 6: mod_base = OTHER; note = sugar modification: 2'-O-methoxyethylribose; note = thymine; note = backbone modification: 5'-phosphorothioate
  modified_base 7: mod_base = OTHER; note = sugar modification: 2'-O-methoxyethylribose; note = backbone modification: 5'-phosphorothioate
  modified_base 8: mod_base = OTHER; note = backbone modification: 5'-phosphorothioate; note = sugar modification: 2'-O-methoxyethylribose; note = thymine
  modified_base 9: mod_base = OTHER; note = sugar modification: 2'-O-methoxyethylribose; note = backbone modification: 5'-phosphorothioate
  modified_base 10: mod_base = m5c; mod_base = OTHER; note = sugar modification: 2'-O-methoxyethylribose; note = backbone modification: 5'-phosphorothioate
  modified_base 11: mod_base = OTHER; note = backbone modification: 5'-phosphorothioate; note = thymine; note = sugar modification: 2'-O-methoxyethylribose
  modified_base 12: mod_base = OTHER; note = thymine; note = sugar modification: 2'-O-methoxyethylribose; note = backbone modification: 5'-phosphorothioate
  modified_base 13: mod_base = m5c; mod_base = OTHER; note = sugar modification: 2'-O-methoxyethylribose; note = backbone modification: 5'-phosphorothioate
  modified_base 14: mod_base = OTHER; note = backbone modification: 5'-phosphorothioate; note = sugar modification: 2'-O-methoxyethylribose
  modified_base 15: mod_base = OTHER; note = thymine; note = backbone modification: 5'-phosphorothioate; note = sugar modification: lna
  modified_base 16: mod_base = m5c; mod_base = OTHER; note = sugar modification: lna
gttcttgtacttcatc

SEQ ID NO: 1011 - RNA, 16 nt, synthetic construct
  source 1..16: mol_type = other RNA; note = Antisense oligonucleotide
  modified_base 1: mod_base = OTHER; note = backbone modification: 5'-phosphorothioate; note = sugar modification: lna
  modified_base 2: mod_base = OTHER; note = thymine; note = sugar modification: lna; note = backbone modification: 5'-phosphorothioate
  modified_base 3: mod_base = OTHER; note = thymine; note = backbone modification: 5'-phosphorothioate; note = sugar modification: lna
  modified_base 4: mod_base = OTHER; mod_base = m5c; note = sugar modification: lna; note = backbone modification: 5'-phosphorothioate
  modified_base 5: mod_base = OTHER; note = thymine; note = sugar modification: 2'-O-methoxyethylribose; note = backbone modification: 5'-phosphorothioate
  modified_base 6: mod_base = OTHER; note = backbone modification: 5'-phosphorothioate; note = thymine; note = sugar modification: 2'-O-methoxyethylribose
  modified_base 7: mod_base = OTHER; note = backbone modification: 5'-phosphorothioate; note = sugar modification: 2'-O-methoxyethylribose
  modified_base 8: mod_base = OTHER; note = thymine; note = backbone modification: 5'-phosphorothioate; note = sugar modification: 2'-O-methoxyethylribose
  modified_base 9: mod_base = OTHER; note = backbone modification: 5'-phosphorothioate; note = sugar modification: 2'-O-methoxyethylribose
  modified_base 10: mod_base = m5c; mod_base = OTHER; note = sugar modification: 2'-O-methoxyethylribose; note = backbone modification: 5'-phosphorothioate
  modified_base 11: mod_base = OTHER; note = backbone modification: 5'-phosphorothioate; note = sugar modification: 2'-O-methoxyethylribose; note = thymine
  modified_base 12: mod_base = OTHER; note = backbone modification: 5'-phosphorothioate; note = sugar modification: 2'-O-methoxyethylribose; note = thymine
  modified_base 13: mod_base = OTHER; mod_base = m5c; note = backbone modification: 5'-phosphorothioate; note = sugar modification: 2'-O-methoxyethylribose
  modified_base 14: mod_base = OTHER; note = backbone modification: 5'-phosphorothioate; note = sugar modification: 2'-O-methoxyethylribose
  modified_base 15: mod_base = OTHER; note = thymine; note = sugar modification: lna; note = backbone modification: 5'-phosphorothioate
  modified_base 16: mod_base = m5c; mod_base = OTHER; note = sugar modification: lna
gttcttgtacttcatc

SEQ ID NO: 1012 - RNA, 16 nt, synthetic construct
  source 1..16: mol_type = other RNA; note = Antisense oligonucleotide
  modified_base 1: mod_base = OTHER; note = backbone modification: 5'-phosphorothioate; note = sugar modification: lna
  modified_base 2: mod_base = OTHER; note = thymine; note = backbone modification: 5'-phosphorothioate; note = sugar modification: 2'-O-methoxyethylribose
  modified_base 3: mod_base = OTHER; note = thymine; note = backbone modification: 5'-phosphorothioate; note = sugar modification: 2'-O-methoxyethylribose
  modified_base 4: mod_base = m5c; mod_base = OTHER; note = backbone modification: 5'-phosphorothioate; note = sugar modification: 2'-O-methoxyethylribose
  modified_base 5: mod_base = OTHER; note = backbone modification: 5'-phosphorothioate; note = sugar modification: 2'-O-methoxyethylribose; note = thymine
  modified_base 6: mod_base = OTHER; note = sugar modification: 2'-O-methoxyethylribose; note = backbone modification: 5'-phosphorothioate; note = thymine
  modified_base 7: mod_base = OTHER; note = sugar modification: 2'-O-methoxyethylribose; note = backbone modification: 5'-phosphorothioate
  modified_base 8: mod_base = OTHER; note = backbone modification: 5'-phosphorothioate; note = sugar modification: 2'-O-methoxyethylribose; note = thymine
  modified_base 9: mod_base = OTHER; note = backbone modification: 5'-phosphorothioate; note = sugar modification: 2'-O-methoxyethylribose
  modified_base 10: mod_base = m5c; mod_base = OTHER; note = sugar modification: 2'-O-methoxyethylribose; note = backbone modification: 5'-phosphorothioate
  modified_base 11: mod_base = OTHER; note = thymine; note = backbone modification: 5'-phosphorothioate; note = sugar modification: 2'-O-methoxyethylribose
  modified_base 12: mod_base = OTHER; note = thymine; note = backbone modification: 5'-phosphorothioate; note = sugar modification: 2'-O-methoxyethylribose
  modified_base 13: mod_base = OTHER; mod_base = m5c; note = backbone modification: 5'-phosphorothioate; note = sugar modification: 2'-O-methoxyethylribose
  modified_base 14: mod_base = OTHER; note = sugar modification: lna; note = backbone modification: 5'-phosphorothioate
  modified_base 15: mod_base = OTHER; note = sugar modification: lna; note = backbone modification: 5'-phosphorothioate; note = thymine
  modified_base 16: mod_base = OTHER; mod_base = m5c; note = sugar modification: lna
gttcttgtacttcatc

SEQ ID NO: 1013 - RNA, 16 nt, synthetic construct
  source 1..16: mol_type = other RNA; note = Antisense oligonucleotide
  modified_base 1: mod_base = OTHER; note = backbone modification: 5'-phosphorothioate; note = sugar modification: lna
  modified_base 2: mod_base = OTHER; note = backbone modification: 5'-phosphorothioate; note = sugar modification: lna; note = thymine
  modified_base 3: mod_base = OTHER; note = backbone modification: 5'-phosphorothioate; note = sugar modification: 2'-O-methoxyethylribose; note = thymine
  modified_base 4: mod_base = OTHER; mod_base = m5c; note = sugar modification: 2'-O-methoxyethylribose; note = backbone modification: 5'-phosphorothioate
  modified_base 5: mod_base = OTHER; note = backbone modification: 5'-phosphorothioate; note = thymine; note = sugar modification: 2'-O-methoxyethylribose
  modified_base 6: mod_base = OTHER; note = sugar modification: 2'-O-methoxyethylribose; note = backbone modification: 5'-phosphorothioate; note = thymine
  modified_base 7: mod_base = OTHER; note = backbone modification: 5'-phosphorothioate; note = sugar modification: 2'-O-methoxyethylribose
  modified_base 8: mod_base = OTHER; note = backbone modification: 5'-phosphorothioate; note = sugar modification: 2'-O-methoxyethylribose; note = thymine
  modified_base 9: mod_base = OTHER; note = sugar modification: 2'-O-methoxyethylribose; note = backbone modification: 5'-phosphorothioate
  modified_base 10: mod_base = OTHER; mod_base = m5c; note = backbone modification: 5'-phosphorothioate; note = sugar modification: 2'-O-methoxyethylribose
  modified_base 11: mod_base = OTHER; note = backbone modification: 5'-phosphorothioate; note = sugar modification: 2'-O-methoxyethylribose; note = thymine
  modified_base 12: mod_base = OTHER; note = sugar modification: 2'-O-methoxyethylribose; note = backbone modification: 5'-phosphorothioate; note = thymine
  modified_base 13: mod_base = m5c; mod_base = OTHER; note = sugar modification: 2'-O-methoxyethylribose; note = backbone modification: 5'-phosphorothioate
  modified_base 14: mod_base = OTHER; note = backbone modification: 5'-phosphorothioate; note = sugar modification: lna
  modified_base 15: mod_base = OTHER; note = sugar modification: lna; note = thymine; note = backbone modification: 5'-phosphorothioate
  modified_base 16: mod_base = OTHER; mod_base = m5c; note = sugar modification: lna
gttcttgtacttcatc

SEQ ID NO: 1014 - RNA, 16 nt, synthetic construct
  source 1..16: mol_type = other RNA; note = Antisense oligonucleotide
  modified_base 1: mod_base = OTHER; note = sugar modification: lna; note = backbone modification: 5'-phosphorothioate
  modified_base 2: mod_base = OTHER; note = sugar modification: lna; note = backbone modification: 5'-phosphorothioate; note = thymine
  modified_base 3: mod_base = OTHER; note = backbone modification: 5'-phosphorothioate; note = sugar modification: lna; note = thymine
  modified_base 4: mod_base = OTHER; mod_base = m5c; note = backbone modification: 5'-phosphorothioate; note = sugar modification: lna
  modified_base 5: mod_base = OTHER; note = backbone modification: 5'-phosphorothioate; note = sugar modification: 2'-O-methoxyethylribose; note = thymine
  modified_base 6: mod_base = OTHER; note = thymine; note = backbone modification: 5'-phosphorothioate; note = sugar modification: 2'-O-methoxyethylribose
  modified_base 7: mod_base = OTHER; note = sugar modification: 2'-O-methoxyethylribose; note = backbone modification: 5'-phosphorothioate
  modified_base 8: mod_base = OTHER; note = backbone modification: 5'-phosphorothioate; note = thymine; note = sugar modification: 2'-O-methoxyethylribose
  modified_base 9: mod_base = OTHER; note = backbone modification: 5'-phosphorothioate; note = sugar modification: 2'-O-methoxyethylribose
  modified_base 10: mod_base = m5c; mod_base = OTHER; note = sugar modification: 2'-O-methoxyethylribose; note = backbone modification: 5'-phosphorothioate
  modified_base 11: mod_base = OTHER; note = backbone modification: 5'-phosphorothioate; note = thymine; note = sugar modification: 2'-O-methoxyethylribose
  modified_base 12: mod_base = OTHER; note = backbone modification: 5'-phosphorothioate; note = sugar modification: 2'-O-methoxyethylribose; note = thymine
  modified_base 13: mod_base = OTHER; mod_base = m5c; note = sugar modification: 2'-O-methoxyethylribose; note = backbone modification: 5'-phosphorothioate
  modified_base 14: mod_base = OTHER; note = backbone modification: 5'-phosphorothioate; note = sugar modification: lna
  modified_base 15: mod_base = OTHER; note = thymine; note = backbone modification: 5'-phosphorothioate; note = sugar modification: lna
  modified_base 16: mod_base = m5c; mod_base = OTHER; note = sugar modification: lna
gttcttgtacttcatc

SEQ ID NO: 1015 - RNA, 16 nt, synthetic construct
  source 1..16: mol_type = other RNA; note = Antisense oligonucleotide
  modified_base 1: mod_base = OTHER; note = backbone modification: 5'-phosphorothioate; note = sugar modification: lna
  modified_base 2: mod_base = OTHER; note = sugar modification: lna; note = thymine; note = backbone modification: 5'-phosphorothioate
  modified_base 3: mod_base = OTHER; note = thymine; note = backbone modification: 5'-phosphorothioate; note = sugar modification: 2'-O-methoxyethylribose
  modified_base 4: mod_base = OTHER; mod_base = m5c; note = sugar modification: 2'-O-methoxyethylribose; note = backbone modification: 5'-phosphorothioate
  modified_base 5: mod_base = OTHER; note = thymine; note = backbone modification: 5'-phosphorothioate; note = sugar modification: 2'-O-methoxyethylribose
  modified_base 6: mod_base = OTHER; note = thymine; note = backbone modification: 5'-phosphorothioate; note = sugar modification: 2'-O-methoxyethylribose
  modified_base 7: mod_base = OTHER; note = backbone modification: 5'-phosphorothioate; note = sugar modification: 2'-O-methoxyethylribose
  modified_base 8: mod_base = OTHER; note = thymine; note = sugar modification: 2'-O-methoxyethylribose; note = backbone modification: 5'-phosphorothioate
  modified_base 9: mod_base = OTHER; note = backbone modification: 5'-phosphorothioate; note = sugar modification: 2'-O-methoxyethylribose
  modified_base 10: mod_base = OTHER; mod_base = m5c; note = sugar modification: 2'-O-methoxyethylribose; note = backbone modification: 5'-phosphorothioate
  modified_base 11: mod_base = OTHER; note = sugar modification: 2'-O-methoxyethylribose; note = backbone modification: 5'-phosphorothioate; note = thymine
  modified_base 12: mod_base = OTHER; note = backbone modification: 5'-phosphorothioate; note = sugar modification: 2'-O-methoxyethylribose; note = thymine
  modified_base 13: mod_base = m5c; mod_base = OTHER; note = sugar modification: lna; note = backbone modification: 5'-phosphorothioate
  modified_base 14: mod_base = OTHER; note = backbone modification: 5'-phosphorothioate; note = sugar modification: lna
  modified_base 15: mod_base = OTHER; note = backbone modification: 5'-phosphorothioate; note = thymine; note = sugar modification: lna
  modified_base 16: mod_base = OTHER; mod_base = m5c; note = sugar modification: lna
gttcttgtacttcatc

SEQ ID NO: 1016 - RNA, 16 nt, synthetic construct
  source 1..16: mol_type = other RNA; note = Antisense oligonucleotide
  modified_base 1: mod_base = OTHER; note = sugar modification: lna; note = backbone modification: 5'-phosphorothioate
  modified_base 2: mod_base = OTHER; note = backbone modification: 5'-phosphorothioate; note = sugar modification: lna; note = thymine
  modified_base 3: mod_base = OTHER; note = thymine; note = sugar modification: lna; note = backbone modification: 5'-phosphorothioate
  modified_base 4: mod_base = OTHER; mod_base = m5c; note = sugar modification: 2'-O-methoxyethylribose; note = backbone modification: 5'-phosphorothioate
  modified_base 5: mod_base = OTHER; note = thymine; note = backbone modification: 5'-phosphorothioate; note = sugar modification: 2'-O-methoxyethylribose
  modified_base 6: mod_base = OTHER; note = sugar modification: 2'-O-methoxyethylribose; note = thymine; note = backbone modification: 5'-phosphorothioate
  modified_base 7: mod_base = OTHER; note = sugar modification: 2'-O-methoxyethylribose; note = backbone modification: 5'-phosphorothioate
  modified_base 8: mod_base = OTHER; note = backbone modification: 5'-phosphorothioate; note = thymine; note = sugar modification: 2'-O-methoxyethylribose
  modified_base 9: mod_base = OTHER; note = backbone modification: 5'-phosphorothioate; note = sugar modification: 2'-O-methoxyethylribose
  modified_base 10: mod_base = OTHER; mod_base = m5c; note = backbone modification: 5'-phosphorothioate; note = sugar modification: 2'-O-methoxyethylribose
  modified_base 11: mod_base = OTHER; note = thymine; note = backbone modification: 5'-phosphorothioate; note = sugar modification: 2'-O-methoxyethylribose
  modified_base 12: mod_base = OTHER; note = sugar modification: 2'-O-methoxyethylribose; note = backbone modification: 5'-phosphorothioate; note = thymine
  modified_base 13: mod_base = OTHER; mod_base = m5c; note = backbone modification: 5'-phosphorothioate; note = sugar modification: lna
  modified_base 14: mod_base = OTHER; note = sugar modification: lna; note = backbone modification: 5'-phosphorothioate
  modified_base 15: mod_base = OTHER; note = backbone modification: 5'-phosphorothioate; note = thymine; note = sugar modification: lna
  modified_base 16: mod_base = OTHER; mod_base = m5c; note = sugar modification: lna
gttcttgtacttcatc

SEQ ID NO: 1017 - RNA, 16 nt, synthetic construct
  source 1..16: mol_type = other RNA; note = Antisense oligonucleotide
  modified_base 1: mod_base = OTHER; note = backbone modification: 5'-phosphorothioate; note = sugar modification: lna
  modified_base 2: mod_base = OTHER; note = sugar modification: lna; note = backbone modification: 5'-phosphorothioate; note = thymine
  modified_base 3: mod_base = OTHER; note = backbone modification: 5'-phosphorothioate; note = thymine; note = sugar modification: lna
  modified_base 4: mod_base = m5c; mod_base = OTHER; note = sugar modification: lna; note = backbone modification: 5'-phosphorothioate
  modified_base 5: mod_base = OTHER; note = backbone modification: 5'-phosphorothioate; note = sugar modification: 2'-O-methoxyethylribose; note = thymine
  modified_base 6: mod_base = OTHER; note = sugar modification: 2'-O-methoxyethylribose; note = backbone modification: 5'-phosphorothioate; note = thymine
  modified_base 7: mod_base = OTHER; note = sugar modification: 2'-O-methoxyethylribose; note = backbone modification: 5'-phosphorothioate
  modified_base 8: mod_base = OTHER; note = sugar modification: 2'-O-methoxyethylribose; note = backbone modification: 5'-phosphorothioate; note = thymine
  modified_base 9: mod_base = OTHER; note = backbone modification: 5'-phosphorothioate; note = sugar modification: 2'-O-methoxyethylribose
  modified_base 10: mod_base = OTHER; mod_base = m5c; note = backbone modification: 5'-phosphorothioate; note = sugar modification: 2'-O-methoxyethylribose
  modified_base 11: mod_base = OTHER; note = backbone modification: 5'-phosphorothioate; note = sugar modification: 2'-O-methoxyethylribose; note = thymine
  modified_base 12: mod_base = OTHER; note = backbone modification: 5'-phosphorothioate; note = thymine; note = sugar modification: 2'-O-methoxyethylribose
  modified_base 13: mod_base = m5c; mod_base = OTHER; note = sugar modification: lna; note = backbone modification: 5'-phosphorothioate
  modified_base 14: mod_base = OTHER; note = sugar modification: lna; note = backbone modification: 5'-phosphorothioate
  modified_base 15: mod_base = OTHER; note = sugar modification: lna; note = backbone modification: 5'-phosphorothioate; note = thymine
  modified_base 16: mod_base = m5c; mod_base = OTHER; note = sugar modification: lna
gttcttgtacttcatc

SEQ ID NO: 1018 - RNA, 16 nt, synthetic construct
  source 1..16: mol_type = other RNA; note = Antisense oligonucleotide
  modified_base 1: mod_base = OTHER; note = sugar modification: lna; note = backbone modification: 5'-phosphorothioate
  modified_base 2: mod_base = OTHER; note = sugar modification: lna; note = backbone modification: 5'-phosphorothioate; note = thymine
  modified_base 3: mod_base = OTHER; note = sugar modification: lna; note = backbone modification: 5'-phosphorothioate; note = thymine
  modified_base 4: mod_base = OTHER; mod_base = m5c; note = sugar modification: lna; note = backbone modification: 5'-phosphorothioate
  modified_base 5: mod_base = OTHER; note = backbone modification: 5'-phosphorothioate; note = thymine; note = sugar modification: lna
  modified_base 6: mod_base = OTHER; note = backbone modification: 5'-phosphorothioate; note = thymine; note = sugar modification: 2'-O-methoxyethylribose
  modified_base 7: mod_base = OTHER; note = backbone modification: 5'-phosphorothioate; note = sugar modification: 2'-O-methoxyethylribose
  modified_base 8: mod_base = OTHER; note = sugar modification: 2'-O-methoxyethylribose; note = backbone modification: 5'-phosphorothioate; note = thymine
  modified_base 9: mod_base = OTHER; note = backbone modification: 5'-phosphorothioate; note = sugar modification: 2'-O-methoxyethylribose
  modified_base 10: mod_base = m5c; mod_base = OTHER; note = backbone modification: 5'-phosphorothioate; note = sugar modification: 2'-O-methoxyethylribose
  modified_base 11: mod_base = OTHER; note = sugar modification: 2'-O-methoxyethylribose; note = backbone modification: 5'-phosphorothioate; note = thymine
  modified_base 12: mod_base = OTHER; note = backbone modification: 5'-phosphorothioate; note = sugar modification: lna; note = thymine
  modified_base 13: mod_base = m5c; mod_base = OTHER; note = sugar modification: lna; note = backbone modification: 5'-phosphorothioate
  modified_base 14: mod_base = OTHER; note = sugar modification: lna; note = backbone modification: 5'-phosphorothioate
  modified_base 15: mod_base = OTHER; note = sugar modification: lna; note = backbone modification: 5'-phosphorothioate; note = thymine
  modified_base 16: mod_base = m5c; mod_base = OTHER; note = sugar modification: lna
gttcttgtacttcatc

SEQ ID NO: 1019 - RNA, 16 nt, synthetic construct
  source 1..16: mol_type = other RNA; note = Antisense oligonucleotide
  modified_base 1: mod_base = OTHER; note = sugar modification: 2'-O-methoxyethylribose; note = backbone modification: 5'-phosphorothioate
  modified_base 2: mod_base = OTHER; note = thymine; note = backbone modification: 5'-phosphorothioate; note = sugar modification: 2'-O-methoxyethylribose
  modified_base 3: mod_base = OTHER; note = backbone modification: 5'-phosphorothioate; note = sugar modification: 2'-O-methoxyethylribose; note = thymine
  modified_base 4: mod_base = OTHER; mod_base = m5c; note = backbone modification: 5'-phosphorothioate; note = sugar modification: 2'-O-methoxyethylribose
  modified_base 5: mod_base = OTHER; note = thymine; note = backbone modification: 5'-phosphorothioate; note = sugar modification: 2'-O-methoxyethylribose
  modified_base 6: mod_base = OTHER; note = backbone modification: 5'-phosphorothioate; note = sugar modification: 2'-O-methoxyethylribose; note = thymine
  modified_base 7: mod_base = OTHER; note = backbone modification: 5'-phosphorothioate; note = sugar modification: 2'-O-methoxyethylribose
  modified_base 8: mod_base = OTHER; note = backbone modification: 5'-phosphorothioate; note = sugar modification: 2'-O-methoxyethylribose; note = thymine
  modified_base 9: mod_base = OTHER; note = sugar modification: 2'-O-methoxyethylribose; note = backbone modification: 5'-phosphorothioate
  modified_base 10: mod_base = m5c; mod_base = OTHER; note = backbone modification: 5'-phosphorothioate; note = sugar modification: 2'-O-methoxyethylribose
  modified_base 11: mod_base = OTHER; note = sugar modification: 2'-O-methoxyethylribose; note = thymine; note = backbone modification: 5'-phosphorothioate
  modified_base 12: mod_base = OTHER; note = thymine; note = sugar modification: 2'-O-methoxyethylribose; note = backbone modification: 5'-phosphorothioate
  modified_base 13: mod_base = m5c; mod_base = OTHER; note = sugar modification: 2'-O-methoxyethylribose; note = backbone modification: 5'-phosphorothioate
  modified_base 14: mod_base = OTHER; note = sugar modification: 2'-O-methoxyethylribose; note = backbone modification: 5'-phosphorothioate
  modified_base 15: mod_base = OTHER; note = sugar modification: 2'-O-methoxyethylribose; note = thymine; note = backbone modification: 5'-phosphorothioate
  modified_base 16: mod_base = m5c; mod_base = OTHER; note = sugar modification: lna
gttcttgtacttcatc

SEQ ID NO: 1020 - RNA, 16 nt, synthetic construct
  source 1..16: mol_type = other RNA; note = Antisense oligonucleotide
  modified_base 1: mod_base = OTHER; note = sugar modification: 2'-O-methoxyethylribose; note = backbone modification: 5'-phosphorothioate
  modified_base 2: mod_base = OTHER; note = thymine; note = sugar modification: 2'-O-methoxyethylribose; note = backbone modification: 5'-phosphorothioate
  modified_base 3: mod_base = OTHER; note = thymine; note = sugar modification: 2'-O-methoxyethylribose; note = backbone modification: 5'-phosphorothioate
  modified_base 4: mod_base = m5c; mod_base = OTHER; note = backbone modification: 5'-phosphorothioate; note = sugar modification: 2'-O-methoxyethylribose
  modified_base 5: mod_base = OTHER; note = backbone modification: 5'-phosphorothioate; note = sugar modification: 2'-O-methoxyethylribose; note = thymine
  modified_base 6: mod_base = OTHER; note = backbone modification: 5'-phosphorothioate; note = sugar modification: 2'-O-methoxyethylribose; note = thymine
  modified_base 7: mod_base = OTHER; note = backbone modification: 5'-phosphorothioate; note = sugar modification: 2'-O-methoxyethylribose
  modified_base 8: mod_base = OTHER; note = sugar modification: 2'-O-methoxyethylribose; note = thymine; note = backbone modification: 5'-phosphorothioate
  modified_base 9: mod_base = OTHER; note = sugar modification: 2'-O-methoxyethylribose; note = backbone modification: 5'-phosphorothioate
  modified_base 10: mod_base = m5c; mod_base = OTHER; note = sugar modification: 2'-O-methoxyethylribose; note = backbone modification: 5'-phosphorothioate
  modified_base 11: mod_base = OTHER; note = backbone modification: 5'-phosphorothioate; note = sugar modification: 2'-O-methoxyethylribose; note = thymine
  modified_base 12: mod_base = OTHER; note = thymine; note = sugar modification: 2'-O-methoxyethylribose; note = backbone modification: 5'-phosphorothioate
  modified_base 13: mod_base = OTHER; mod_base = m5c; note = sugar modification: 2'-O-methoxyethylribose; note = backbone modification: 5'-phosphorothioate
  modified_base 14: mod_base = OTHER; note = backbone modification: 5'-phosphorothioate; note = sugar modification: 2'-O-methoxyethylribose
  modified_base 15: mod_base = OTHER; note = thymine; note = backbone modification: 5'-phosphorothioate; note = sugar modification: lna
  modified_base 16: mod_base = m5c; mod_base = OTHER; note = sugar modification: lna
gttcttgtacttcatc

SEQ ID NO: 1021 - RNA, 16 nt, synthetic construct
  source 1..16: mol_type = other RNA; note = Antisense oligonucleotide
  modified_base 1: mod_base = OTHER; note = backbone modification: 5'-phosphorothioate; note = sugar modification: 2'-O-methoxyethylribose
  modified_base 2: mod_base = OTHER; note = thymine; note = sugar modification: 2'-O-methoxyethylribose; note = backbone modification: 5'-phosphorothioate
  modified_base 3: mod_base = OTHER; note = backbone modification: 5'-phosphorothioate; note = sugar modification: 2'-O-methoxyethylribose; note = thymine
  modified_base 4: mod_base = OTHER; mod_base = m5c; note = backbone modification: 5'-phosphorothioate; note = sugar modification: 2'-O-methoxyethylribose
  modified_base 5: mod_base = OTHER; note = backbone modification: 5'-phosphorothioate; note = sugar modification: 2'-O-methoxyethylribose; note = thymine
  modified_base 6: mod_base = OTHER; note = backbone modification: 5'-phosphorothioate; note = thymine; note = sugar modification: 2'-O-methoxyethylribose
  modified_base 7: mod_base = OTHER; note = backbone modification: 5'-phosphorothioate; note = sugar modification: 2'-O-methoxyethylribose
  modified_base 8: mod_base = OTHER; note = sugar modification: 2'-O-methoxyethylribose; note = thymine; note = backbone modification: 5'-phosphorothioate
  modified_base 9: mod_base = OTHER; note = backbone modification: 5'-phosphorothioate; note = sugar modification: 2'-O-methoxyethylribose
  modified_base 10: mod_base = m5c; mod_base = OTHER; note = backbone modification: 5'-phosphorothioate; note = sugar modification: 2'-O-methoxyethylribose
  modified_base 11: mod_base = OTHER; note = sugar modification: 2'-O-methoxyethylribose; note = thymine; note = backbone modification: 5'-phosphorothioate
  modified_base 12: mod_base = OTHER; note = backbone modification: 5'-phosphorothioate; note = sugar modification: 2'-O-methoxyethylribose; note = thymine
  modified_base 13: mod_base = m5c; mod_base = OTHER; note = sugar modification: 2'-O-methoxyethylribose; note = backbone modification: 5'-phosphorothioate
  modified_base 14: mod_base = OTHER; note = sugar modification: lna; note = backbone modification: 5'-phosphorothioate
  modified_base 15: mod_base = OTHER; note = backbone modification: 5'-phosphorothioate; note = thymine; note = sugar modification: lna
  modified_base 16: mod_base = OTHER; mod_base = m5c; note = sugar modification: lna
gttcttgtacttcatc

SEQ ID NO: 1022 - RNA, 16 nt, synthetic construct
  source 1..16: mol_type = other RNA; note = Antisense oligonucleotide
  modified_base 1: mod_base = OTHER; note = backbone modification: 5'-phosphorothioate; note = sugar modification: lna; note = thymine
  modified_base 2: mod_base = OTHER; note = sugar modification: lna; note = backbone modification: 5'-phosphorothioate
  modified_base 3: mod_base = OTHER; note = backbone modification: 5'-phosphorothioate; note = thymine; note = sugar modification: lna
  modified_base 4: mod_base = OTHER; note = backbone modification: 5'-phosphorothioate; note = thymine; note = sugar modification: 2'-O-methoxyethylribose
  modified_base 5: mod_base = m5c; mod_base = OTHER; note = backbone modification: 5'-phosphorothioate; note = sugar modification: 2'-O-methoxyethylribose
  modified_base 6: mod_base = OTHER; note = thymine; note = sugar modification: 2'-O-methoxyethylribose; note = backbone modification: 5'-phosphorothioate
  modified_base 7: mod_base = OTHER; note = sugar modification: 2'-O-methoxyethylribose; note = thymine; note = backbone modification: 5'-phosphorothioate
  modified_base 8: mod_base = OTHER; note = sugar modification: 2'-O-methoxyethylribose; note = backbone modification: 5'-phosphorothioate
  modified_base 9: mod_base = OTHER; note = backbone modification: 5'-phosphorothioate; note = thymine; note = sugar modification: 2'-O-methoxyethylribose
  modified_base 10: mod_base = OTHER; note = backbone modification: 5'-phosphorothioate; note = sugar modification: 2'-O-methoxyethylribose
  modified_base 11: mod_base = OTHER; mod_base = m5c; note = sugar modification: 2'-O-methoxyethylribose; note = backbone modification: 5'-phosphorothioate
  modified_base 12: mod_base = OTHER; note = sugar modification: 2'-O-methoxyethylribose; note = thymine; note = backbone modification: 5'-phosphorothioate
  modified_base 13: mod_base = OTHER; note = backbone modification: 5'-phosphorothioate; note = sugar modification: 2'-O-methoxyethylribose; note = thymine
  modified_base 14: mod_base = m5c; mod_base = OTHER; note = backbone modification: 5'-phosphorothioate; note = sugar modification: lna
  modified_base 15: mod_base = OTHER; note = sugar modification: lna; note = backbone modification: 5'-phosphorothioate
  modified_base 16: mod_base = OTHER; note = sugar modification: lna; note = thymine
tgttcttgtacttcat

SEQ ID NO: 1023 - RNA, 16 nt, synthetic construct
  source 1..16: mol_type = other RNA; note = Antisense oligonucleotide
  modified_base 1: mod_base = OTHER; note = sugar modification: lna; note = backbone modification: 5'-phosphorothioate; note = thymine
  modified_base 2: mod_base = OTHER; note = sugar modification: 2'-O-methoxyethylribose; note = backbone modification: 5'-phosphorothioate
  modified_base 3: mod_base = OTHER; note = backbone modification: 5'-phosphorothioate; note = thymine; note = sugar modification: 2'-O-methoxyethylribose
  modified_base 4: mod_base = OTHER; note = backbone modification: 5'-phosphorothioate; note = sugar modification: 2'-O-methoxyethylribose; note = thymine
  modified_base 5: mod_base = m5c; mod_base = OTHER; note = backbone modification: 5'-phosphorothioate; note = sugar modification: 2'-O-methoxyethylribose
  modified_base 6: mod_base = OTHER; note = thymine; note = sugar modification: 2'-O-methoxyethylribose; note = backbone modification: 5'-phosphorothioate
  modified_base 7: mod_base = OTHER; note = backbone modification: 5'-phosphorothioate; note = thymine; note = sugar modification: 2'-O-methoxyethylribose
  modified_base 8: mod_base = OTHER; note = backbone modification: 5'-phosphorothioate; note = sugar modification: 2'-O-methoxyethylribose
  modified_base 9: mod_base = OTHER; note = sugar modification: 2'-O-methoxyethylribose; note = thymine; note = backbone modification: 5'-phosphorothioate
  modified_base 10: mod_base = OTHER; note = sugar modification: 2'-O-methoxyethylribose; note = backbone modification: 5'-phosphorothioate
  modified_base 11: mod_base = m5c; mod_base = OTHER; note = backbone modification: 5'-phosphorothioate; note = sugar modification: 2'-O-methoxyethylribose
  modified_base 12: mod_base = OTHER; note = backbone modification: 5'-phosphorothioate; note = sugar modification: 2'-O-methoxyethylribose; note = thymine
  modified_base 13: mod_base = OTHER; note = thymine; note = sugar modification: 2'-O-methoxyethylribose; note = backbone modification: 5'-phosphorothioate
  modified_base 14: mod_base = OTHER; mod_base = m5c; note = backbone modification: 5'-phosphorothioate; note = sugar modification: 2'-O-methoxyethylribose
  modified_base 15: mod_base = OTHER; note = sugar modification: 2'-O-methoxyethylribose; note = backbone modification: 5'-phosphorothioate
  modified_base 16: mod_base = OTHER; note = sugar modification: 2'-O-methoxyethylribose; note = thymine
tgttcttgtacttcat

SEQ ID NO: 1024 - RNA, 16 nt, synthetic construct
  source 1..16: mol_type = other RNA; note = Antisense oligonucleotide
  modified_base 1: mod_base = OTHER; note = thymine; note = sugar modification: lna; note = backbone modification: 5'-phosphorothioate
  modified_base 2: mod_base = OTHER; note = sugar modification: lna; note = backbone modification: 5'-phosphorothioate
  modified_base 3: mod_base = OTHER; note = backbone modification: 5'-phosphorothioate; note = thymine; note = sugar modification: 2'-O-methoxyethylribose
  modified_base 4: mod_base = OTHER; note = sugar modification: 2'-O-methoxyethylribose; note = backbone modification: 5'-phosphorothioate; note = thymine
  modified_base 5: mod_base = m5c; mod_base = OTHER; note = backbone modification: 5'-phosphorothioate; note = sugar modification: 2'-O-methoxyethylribose
  modified_base 6: mod_base = OTHER; note = thymine; note = backbone modification: 5'-phosphorothioate; note = sugar modification: 2'-O-methoxyethylribose
  modified_base 7: mod_base = OTHER; note = sugar modification: 2'-O-methoxyethylribose; note = backbone modification: 5'-phosphorothioate; note = thymine
  modified_base 8: mod_base = OTHER; note = backbone modification: 5'-phosphorothioate; note = sugar modification: 2'-O-methoxyethylribose
  modified_base 9: mod_base = OTHER; note = sugar modification: 2'-O-methoxyethylribose; note = thymine; note = backbone modification: 5'-phosphorothioate
  modified_base 10: mod_base = OTHER; note = backbone modification: 5'-phosphorothioate; note = sugar modification: 2'-O-methoxyethylribose
  modified_base 11: mod_base = OTHER; mod_base = m5c; note = backbone modification: 5'-phosphorothioate; note = sugar modification: 2'-O-methoxyethylribose
  modified_base 12: mod_base = OTHER; note = thymine; note = backbone modification: 5'-phosphorothioate; note = sugar modification: 2'-O-methoxyethylribose
  modified_base 13: mod_base = OTHER; note = thymine; note = sugar modification: 2'-O-methoxyethylribose; note = backbone modification: 5'-phosphorothioate
  modified_base 14: mod_base = OTHER; mod_base = m5c; note = sugar modification: 2'-O-methoxyethylribose; note = backbone modification: 5'-phosphorothioate
  modified_base 15: mod_base = OTHER; note = backbone modification: 5'-phosphorothioate; note = sugar modification: 2'-O-methoxyethylribose
  modified_base 16: mod_base = OTHER; note = sugar modification: 2'-O-methoxyethylribose; note = thymine
tgttcttgtacttcat

SEQ ID NO: 1025 - RNA, 16 nt, synthetic construct
  source 1..16: mol_type = other RNA; note = Antisense oligonucleotide
  modified_base 1: mod_base = OTHER; note = sugar modification: lna; note = thymine; note = backbone modification: 5'-phosphorothioate
  modified_base 2: mod_base = OTHER; note = backbone modification: 5'-phosphorothioate; note = sugar modification: lna
  modified_base 3: mod_base = OTHER; note = sugar modification: lna; note = backbone modification: 5'-phosphorothioate; note = thymine
  modified_base 4: mod_base = OTHER; note = backbone modification: 5'-phosphorothioate; note = thymine; note = sugar modification: 2'-O-methoxyethylribose
  modified_base 5: mod_base = OTHER; mod_base = m5c; note = sugar modification: 2'-O-methoxyethylribose; note = backbone modification: 5'-phosphorothioate
  modified_base 6: mod_base = OTHER; note = thymine; note = backbone modification: 5'-phosphorothioate; note = sugar modification: 2'-O-methoxyethylribose
  modified_base 7: mod_base = OTHER; note = thymine; note = backbone modification: 5'-phosphorothioate; note = sugar modification: 2'-O-methoxyethylribose
  modified_base 8: mod_base = OTHER; note = backbone modification: 5'-phosphorothioate; note = sugar modification: 2'-O-methoxyethylribose
  modified_base 9: mod_base = OTHER; note = thymine; note = sugar modification: 2'-O-methoxyethylribose; note = backbone modification: 5'-phosphorothioate
  modified_base 10: mod_base = OTHER; note = backbone modification: 5'-phosphorothioate; note = sugar modification: 2'-O-methoxyethylribose
  modified_base 11: mod_base = m5c; mod_base = OTHER; note = sugar modification: 2'-O-methoxyethylribose; note = backbone modification: 5'-phosphorothioate
  modified_base 12: mod_base = OTHER; note = thymine; note = sugar modification: 2'-O-methoxyethylribose; note = backbone modification: 5'-phosphorothioate
  modified_base 13: mod_base = OTHER; note = backbone modification: 5'-phosphorothioate; note = thymine; note = sugar modification: 2'-O-methoxyethylribose
  modified_base 14: mod_base = OTHER; mod_base = m5c; note = sugar modification: 2'-O-methoxyethylribose; note = backbone modification: 5'-phosphorothioate
  modified_base 15: mod_base = OTHER; note = backbone modification: 5'-phosphorothioate; note = sugar modification: 2'-O-methoxyethylribose
  modified_base 16: mod_base = OTHER; note = thymine; note = sugar modification: 2'-O-methoxyethylribose
tgttcttgtacttcat

SEQ ID NO: 1026 - RNA, 16 nt, synthetic construct
  source 1..16: mol_type = other RNA; note = Antisense oligonucleotide
  modified_base 1: mod_base = OTHER; note = backbone modification: 5'-phosphorothioate; note = sugar modification: lna; note = thymine
  modified_base 2: mod_base = OTHER; note = backbone modification: 5'-phosphorothioate; note = sugar modification: lna
  modified_base 3: mod_base = OTHER; note = sugar modification: lna; note = thymine; note = backbone modification: 5'-phosphorothioate
  modified_base 4: mod_base = OTHER; note = thymine; note = sugar modification: 2'-O-methoxyethylribose; note = backbone modification: 5'-phosphorothioate
  modified_base 5: mod_base = m5c; mod_base = OTHER; note = sugar modification: 2'-O-methoxyethylribose; note = backbone modification: 5'-phosphorothioate
  modified_base 6: mod_base = OTHER; note = sugar modification: 2'-O-methoxyethylribose; note = thymine; note = backbone modification: 5'-phosphorothioate
  modified_base 7: mod_base = OTHER; note = backbone modification: 5'-phosphorothioate; note = sugar modification: 2'-O-methoxyethylribose; note = thymine
  modified_base 8: mod_base = OTHER; note = sugar modification: 2'-O-methoxyethylribose; note = backbone modification: 5'-phosphorothioate
  modified_base 9: mod_base = OTHER; note = sugar modification: 2'-O-methoxyethylribose; note = backbone modification: 5'-phosphorothioate; note = thymine
  modified_base 10: mod_base = OTHER; note = sugar modification: 2'-O-methoxyethylribose; note = backbone modification: 5'-phosphorothioate
  modified_base 11: mod_base = m5c; mod_base = OTHER; note = sugar modification: 2'-O-methoxyethylribose; note = backbone modification: 5'-phosphorothioate
  modified_base 12: mod_base = OTHER; note = backbone modification: 5'-phosphorothioate; note = thymine; note = sugar modification: 2'-O-methoxyethylribose
  modified_base 13: mod_base = OTHER; note = sugar modification: 2'-O-methoxyethylribose; note = backbone modification: 5'-phosphorothioate; note = thymine
  modified_base 14: mod_base = OTHER; mod_base = m5c; note = sugar modification: 2'-O-methoxyethylribose; note = backbone modification: 5'-phosphorothioate
  modified_base 15: mod_base = OTHER; note = sugar modification: 2'-O-methoxyethylribose; note = backbone modification: 5'-phosphorothioate
  modified_base 16: mod_base = OTHER; note = thymine; note = sugar modification: lna
tgttcttgtacttcat

SEQ ID NO: 1027 - RNA, 16 nt, synthetic construct
  source 1..16: mol_type = other RNA; note = Antisense oligonucleotide
  modified_base 1: mod_base = OTHER; note = sugar modification: lna; note = backbone modification: 5'-phosphorothioate; note = thymine
  modified_base 2: mod_base = OTHER; note = sugar modification: lna; note = backbone modification: 5'-phosphorothioate
  modified_base 3: mod_base = OTHER; note = sugar modification: lna; note = thymine; note = backbone modification: 5'-phosphorothioate
  modified_base 4: mod_base = OTHER; note = backbone modification: 5'-phosphorothioate; note = sugar modification: 2'-O-methoxyethylribose; note = thymine
  modified_base 5: mod_base = m5c; mod_base = OTHER; note = sugar modification: 2'-O-methoxyethylribose; note = backbone modification: 5'-phosphorothioate
  modified_base 6: mod_base = OTHER; note = backbone modification: 5'-phosphorothioate; note = sugar modification: 2'-O-methoxyethylribose; note = thymine
  modified_base 7: mod_base = OTHER; note = thymine; note = sugar modification: 2'-O-methoxyethylribose; note = backbone modification: 5'-phosphorothioate
  modified_base 8: mod_base = OTHER; note = backbone modification: 5'-phosphorothioate; note = sugar modification: 2'-O-methoxyethylribose
  modified_base 9: mod_base = OTHER; note = thymine; note = sugar modification: 2'-O-methoxyethylribose; note = backbone modification: 5'-phosphorothioate
  modified_base 10: mod_base = OTHER; note = backbone modification: 5'-phosphorothioate; note = sugar modification: 2'-O-methoxyethylribose
  modified_base 11: mod_base = m5c; mod_base = OTHER; note = backbone modification: 5'-phosphorothioate; note = sugar modification: 2'-O-methoxyethylribose
  modified_base 12: mod_base = OTHER; note = thymine; note = backbone modification: 5'-phosphorothioate; note = sugar modification: 2'-O-methoxyethylribose
  modified_base 13: mod_base = OTHER; note = backbone modification: 5'-phosphorothioate; note = thymine; note = sugar modification: 2'-O-methoxyethylribose
  modified_base 14: mod_base = m5c; mod_base = OTHER; note = sugar modification: 2'-O-methoxyethylribose; note = backbone modification: 5'-phosphorothioate
  modified_base 15: mod_base = OTHER; note = sugar modification: lna; note = backbone modification: 5'-phosphorothioate
  modified_base 16: mod_base = OTHER; note = sugar modification: lna; note = thymine
tgttcttgtacttcat

SEQ ID NO: 1028 - RNA, 16 nt, synthetic construct
  source 1..16: mol_type = other RNA; note = Antisense oligonucleotide
  modified_base 1: mod_base = OTHER; note = backbone modification: 5'-phosphorothioate; note = thymine; note = sugar modification: lna
  modified_base 2: mod_base = OTHER; note = backbone modification: 5'-phosphorothioate; note = sugar modification: lna
  modified_base 3: mod_base = OTHER; note = backbone modification: 5'-phosphorothioate; note = sugar modification: lna; note = thymine
  modified_base 4: mod_base = OTHER; note = sugar modification: lna; note = backbone modification: 5'-phosphorothioate; note = thymine
  modified_base 5: mod_base = m5c; mod_base = OTHER; note = backbone modification: 5'-phosphorothioate; note = sugar modification: 2'-O-methoxyethylribose
  modified_base 6: mod_base = OTHER; note = thymine; note = sugar modification: 2'-O-methoxyethylribose; note = backbone modification: 5'-phosphorothioate
  modified_base 7: mod_base = OTHER; note = backbone modification: 5'-phosphorothioate; note = thymine; note = sugar modification: 2'-O-methoxyethylribose
  modified_base 8: mod_base = OTHER; note = backbone modification: 5'-phosphorothioate; note = sugar modification: 2'-O-methoxyethylribose
  modified_base 9: mod_base = OTHER; note = backbone modification: 5'-phosphorothioate; note = thymine; note = sugar modification: 2'-O-methoxyethylribose
  modified_base 10: mod_base = OTHER; note = sugar modification: 2'-O-methoxyethylribose; note = backbone modification: 5'-phosphorothioate
  modified_base 11: mod_base = m5c; mod_base = OTHER; note = sugar modification: 2'-O-methoxyethylribose; note = backbone modification: 5'-phosphorothioate
  modified_base 12: mod_base = OTHER; note = sugar modification: 2'-O-methoxyethylribose; note = backbone modification: 5'-phosphorothioate; note = thymine
  modified_base 13: mod_base = OTHER; note = sugar modification: 2'-O-methoxyethylribose; note = backbone modification: 5'-phosphorothioate; note = thymine
  modified_base 14: mod_base = OTHER; mod_base = m5c; note = backbone modification: 5'-phosphorothioate; note = sugar modification: 2'-O-methoxyethylribose
  modified_base 15: mod_base = OTHER; note = backbone modification: 5'-phosphorothioate; note = sugar modification: lna
  modified_base 16: mod_base = OTHER; note = sugar modification: lna; note = thymine
tgttcttgtacttcat

SEQ ID NO: 1029 - RNA, 16 nt, synthetic construct
  source 1..16: mol_type = other RNA; note = Antisense oligonucleotide
  modified_base 1: mod_base = OTHER; note = thymine; note = backbone modification: 5'-phosphorothioate; note = sugar modification: lna
  modified_base 2: mod_base = OTHER; note = backbone modification: 5'-phosphorothioate; note = sugar modification: 2'-O-methoxyethylribose
  modified_base 3: mod_base = OTHER; note = backbone modification: 5'-phosphorothioate; note = thymine; note = sugar modification: 2'-O-methoxyethylribose
  modified_base 4: mod_base = OTHER; note = thymine; note = sugar modification: 2'-O-methoxyethylribose; note = backbone modification: 5'-phosphorothioate
  modified_base 5: mod_base = OTHER; mod_base = m5c; note = backbone modification: 5'-phosphorothioate; note = sugar modification: 2'-O-methoxyethylribose
  modified_base 6: mod_base = OTHER; note = backbone modification: 5'-phosphorothioate; note = sugar modification: 2'-O-methoxyethylribose; note = thymine
  modified_base 7: mod_base = OTHER; note = thymine; note = sugar modification: 2'-O-methoxyethylribose; note = backbone modification: 5'-phosphorothioate
  modified_base 8: mod_base = OTHER; note = sugar modification: 2'-O-methoxyethylribose; note = backbone modification: 5'-phosphorothioate
  modified_base 9: mod_base = OTHER; note = backbone modification: 5'-phosphorothioate; note = thymine; note = sugar modification: 2'-O-methoxyethylribose
  modified_base 10: mod_base = OTHER; note = backbone modification: 5'-phosphorothioate; note = sugar modification: 2'-O-methoxyethylribose
  modified_base 11: mod_base = m5c; mod_base = OTHER; note = sugar modification: 2'-O-methoxyethylribose; note = backbone modification: 5'-phosphorothioate
  modified_base 12: mod_base = OTHER; note = backbone modification: 5'-phosphorothioate; note = sugar modification: 2'-O-methoxyethylribose; note = thymine
  modified_base 13: mod_base = OTHER; note = thymine; note = sugar modification: 2'-O-methoxyethylribose; note = backbone modification: 5'-phosphorothioate
  modified_base 14: mod_base = OTHER; mod_base = m5c; note = backbone modification: 5'-phosphorothioate; note = sugar modification: lna
  modified_base 15: mod_base = OTHER; note = sugar modification: lna; note = backbone modification: 5'-phosphorothioate
  modified_base 16: mod_base = OTHER; note = thymine; note = sugar modification: lna
tgttcttgtacttcat

SEQ ID NO: 1030 - RNA, 16 nt, synthetic construct
  source 1..16: mol_type = other RNA; note = Antisense oligonucleotide
  modified_base 1: mod_base = OTHER; note = thymine; note = sugar modification: lna; note = backbone modification: 5'-phosphorothioate
  modified_base 2: mod_base = OTHER; note = sugar modification: lna; note = backbone modification: 5'-phosphorothioate
  modified_base 3: mod_base = OTHER; note = sugar modification: 2'-O-methoxyethylribose; note = backbone modification: 5'-phosphorothioate; note = thymine
  modified_base 4: mod_base = OTHER; note = backbone modification: 5'-phosphorothioate; note = sugar modification: 2'-O-methoxyethylribose; note = thymine
  modified_base 5: mod_base = m5c; mod_base = OTHER; note = backbone modification: 5'-phosphorothioate; note = sugar modification: 2'-O-methoxyethylribose
  modified_base 6: mod_base = OTHER; note = thymine; note = sugar modification: 2'-O-methoxyethylribose; note = backbone modification: 5'-phosphorothioate
  modified_base 7: mod_base = OTHER; note = sugar modification: 2'-O-methoxyethylribose; note = backbone modification: 5'-phosphorothioate; note = thymine
  modified_base 8: mod_base = OTHER; note = backbone modification: 5'-phosphorothioate; note = sugar modification: 2'-O-methoxyethylribose
  modified_base 9: mod_base = OTHER; note = backbone modification: 5'-phosphorothioate; note = thymine; note = sugar modification: 2'-O-methoxyethylribose
  modified_base 10: mod_base = OTHER; note = backbone modification: 5'-phosphorothioate; note = sugar modification: 2'-O-methoxyethylribose
  modified_base 11: mod_base = OTHER; mod_base = m5c; note = backbone modification: 5'-phosphorothioate; note = sugar modification: 2'-O-methoxyethylribose
  modified_base 12: mod_base = OTHER; note = backbone modification: 5'-phosphorothioate; note = sugar modification: 2'-O-methoxyethylribose; note = thymine
  modified_base 13: mod_base = OTHER; note = backbone modification: 5'-phosphorothioate; note = sugar modification: 2'-O-methoxyethylribose; note = thymine
  modified_base 14: mod_base = m5c; mod_base = OTHER; note = sugar modification: lna; note = backbone modification: 5'-phosphorothioate
  modified_base 15: mod_base = OTHER; note = sugar modification: lna; note = backbone modification: 5'-phosphorothioate
  modified_base 16: mod_base = OTHER; note = sugar modification: lna; note = thymine
tgttcttgtacttcat

SEQ ID NO: 1031 - RNA, 16 nt, synthetic construct
  source 1..16: mol_type = other RNA; note = Antisense oligonucleotide
  modified_base 1: mod_base = OTHER; note = sugar modification: lna; note = thymine; note = backbone modification: 5'-phosphorothioate
  modified_base 2: mod_base = OTHER; note = sugar modification: lna; note = backbone modification: 5'-phosphorothioate
  modified_base 3: mod_base = OTHER; note = sugar modification: lna; note = backbone modification: 5'-phosphorothioate; note = thymine
  modified_base 4: mod_base = OTHER; note = sugar modification: lna; note = thymine; note = backbone modification: 5'-phosphorothioate
  modified_base 5: mod_base = OTHER; mod_base = m5c; note = backbone modification: 5'-phosphorothioate; note = sugar modification: 2'-O-methoxyethylribose
  modified_base 6: mod_base = OTHER; note = backbone modification: 5'-phosphorothioate; note = thymine; note = sugar modification: 2'-O-methoxyethylribose
  modified_base 7: mod_base = OTHER; note = backbone modification: 5'-phosphorothioate; note = thymine; note = sugar modification: 2'-O-methoxyethylribose
  modified_base 8: mod_base = OTHER; note = backbone modification: 5'-phosphorothioate; note = sugar modification: 2'-O-methoxyethylribose
  modified_base 9: mod_base = OTHER; note = sugar modification: 2'-O-methoxyethylribose; note = backbone modification: 5'-phosphorothioate; note = thymine
  modified_base 10: mod_base = OTHER; note = sugar modification: 2'-O-methoxyethylribose; note = backbone modification: 5'-phosphorothioate
  modified_base 11: mod_base = m5c; mod_base = OTHER; note = backbone modification: 5'-phosphorothioate; note = sugar modification: 2'-O-methoxyethylribose
  modified_base 12: mod_base = OTHER; note = backbone modification: 5'-phosphorothioate; note = thymine; note = sugar modification: 2'-O-methoxyethylribose
  modified_base 13: mod_base = OTHER; note = sugar modification: 2'-O-methoxyethylribose; note = thymine; note = backbone modification: 5'-phosphorothioate
  modified_base 14: mod_base = OTHER; mod_base = m5c; note = backbone modification: 5'-phosphorothioate; note = sugar modification: lna
  modified_base 15: mod_base = OTHER; note = backbone modification: 5'-phosphorothioate; note = sugar modification: lna
  modified_base 16: mod_base = OTHER; note = sugar modification: lna; note = thymine
tgttcttgtacttcat

SEQ ID NO: 1032 - RNA, 16 nt, synthetic construct
  source 1..16: mol_type = other RNA; note = Antisense oligonucleotide
  modified_base 1: mod_base = OTHER; note = backbone modification: 5'-phosphorothioate; note = thymine; note = sugar modification: lna
  modified_base 2: mod_base = OTHER; note = backbone modification: 5'-phosphorothioate; note = sugar modification: lna
  modified_base 3: mod_base = OTHER; note = backbone modification: 5'-phosphorothioate; note = thymine; note = sugar modification: 2'-O-methoxyethylribose
  modified_base 4: mod_base = OTHER; note = sugar modification: 2'-O-methoxyethylribose; note = thymine; note = backbone modification: 5'-phosphorothioate
  modified_base 5: mod_base = m5c; mod_base = OTHER; note = backbone modification: 5'-phosphorothioate; note = sugar modification: 2'-O-methoxyethylribose
  modified_base 6: mod_base = OTHER; note = thymine; note = backbone modification: 5'-phosphorothioate; note = sugar modification: 2'-O-methoxyethylribose
  modified_base 7: mod_base = OTHER; note = sugar modification: 2'-O-methoxyethylribose; note = backbone modification: 5'-phosphorothioate; note = thymine
  modified_base 8: mod_base = OTHER; note = sugar modification: 2'-O-methoxyethylribose; note = backbone modification: 5'-phosphorothioate
  modified_base 9: mod_base = OTHER; note = thymine; note = backbone modification: 5'-phosphorothioate; note = sugar modification: 2'-O-methoxyethylribose
  modified_base 10: mod_base = OTHER; note = sugar modification: 2'-O-methoxyethylribose; note = backbone modification: 5'-phosphorothioate
  modified_base 11: mod_base = m5c; mod_base = OTHER; note = backbone modification: 5'-phosphorothioate; note = sugar modification: 2'-O-methoxyethylribose
  modified_base 12: mod_base = OTHER; note = thymine; note = backbone modification: 5'-phosphorothioate; note = sugar modification: 2'-O-methoxyethylribose
  modified_base 13: mod_base = OTHER; note = sugar modification: lna; note = backbone modification: 5'-phosphorothioate; note = thymine
  modified_base 14: mod_base = m5c; mod_base = OTHER; note = backbone modification: 5'-phosphorothioate; note = sugar modification: lna
  modified_base 15: mod_base = OTHER; note = backbone modification: 5'-phosphorothioate; note = sugar modification: lna
  modified_base 16: mod_base = OTHER; note = thymine; note = sugar modification: lna
tgttcttgtacttcat

SEQ ID NO: 1033 - RNA, 16 nt, synthetic construct
  source 1..16: mol_type = other RNA; note = Antisense oligonucleotide
  modified_base 1: mod_base = OTHER; note = backbone modification: 5'-phosphorothioate; note = thymine; note = sugar modification: lna
  modified_base 2: mod_base = OTHER; note = sugar modification: lna; note = backbone modification: 5'-phosphorothioate
  modified_base 3: mod_base = OTHER; note = backbone modification: 5'-phosphorothioate; note = sugar modification: lna; note = thymine
  modified_base 4: mod_base = OTHER; note = sugar modification: 2'-O-methoxyethylribose; note = backbone modification: 5'-phosphorothioate; note = thymine
  modified_base 5: mod_base = m5c; mod_base = OTHER; note = backbone modification: 5'-phosphorothioate; note = sugar modification: 2'-O-methoxyethylribose
  modified_base 6: mod_base = OTHER; note = thymine; note = backbone modification: 5'-phosphorothioate; note = sugar modification: 2'-O-methoxyethylribose
  modified_base 7: mod_base = OTHER; note = backbone modification: 5'-phosphorothioate; note = thymine; note = sugar modification: 2'-O-methoxyethylribose
  modified_base 8: mod_base = OTHER; note = backbone modification: 5'-phosphorothioate; note = sugar modification: 2'-O-methoxyethylribose
  modified_base 9: mod_base = OTHER; note = backbone modification: 5'-phosphorothioate; note = sugar modification: 2'-O-methoxyethylribose; note = thymine
  modified_base 10: mod_base = OTHER; note = sugar modification: 2'-O-methoxyethylribose; note = backbone modification: 5'-phosphorothioate
  modified_base 11: mod_base = m5c; mod_base = OTHER; note = sugar modification: 2'-O-methoxyethylribose; note = backbone modification: 5'-phosphorothioate
  modified_base 12: mod_base = OTHER; note = backbone modification: 5'-phosphorothioate; note = sugar modification: 2'-O-methoxyethylribose; note = thymine
  modified_base 13: mod_base = OTHER; note = thymine; note = backbone modification: 5'-phosphorothioate; note = sugar modification: lna
  modified_base 14: mod_base = OTHER; mod_base = m5c; note = backbone modification: 5'-phosphorothioate; note = sugar modification: lna
  modified_base 15: mod_base = OTHER; note = sugar modification: lna; note = backbone modification: 5'-phosphorothioate
  modified_base 16: mod_base = OTHER; note = thymine; note = sugar modification: lna
tgttcttgtacttcat

SEQ ID NO: 1034 - RNA, 16 nt, synthetic construct
  source 1..16: mol_type = other RNA; note = Antisense oligonucleotide
  modified_base 1: mod_base = OTHER; note = sugar modification: lna; note = backbone modification: 5'-phosphorothioate; note = thymine
  modified_base 2: mod_base = OTHER; note = sugar modification: lna; note = backbone modification: 5'-phosphorothioate
  modified_base 3: mod_base = OTHER; note = thymine; note = backbone modification: 5'-phosphorothioate; note = sugar modification: lna
  modified_base 4: mod_base = OTHER; note = backbone modification: 5'-phosphorothioate; note = sugar modification: lna; note = thymine
  modified_base 5: mod_base = OTHER; mod_base = m5c; note = backbone modification: 5'-phosphorothioate; note = sugar modification: 2'-O-methoxyethylribose
  modified_base 6: mod_base = OTHER; note = thymine; note = sugar modification: 2'-O-methoxyethylribose; note = backbone modification: 5'-phosphorothioate
  modified_base 7: mod_base = OTHER; note = backbone modification: 5'-phosphorothioate; note = sugar modification: 2'-O-methoxyethylribose; note = thymine
  modified_base 8: mod_base = OTHER; note = backbone modification: 5'-phosphorothioate; note = sugar modification: 2'-O-methoxyethylribose
  modified_base 9: mod_base = OTHER; note = thymine; note = sugar modification: 2'-O-methoxyethylribose; note = backbone modification: 5'-phosphorothioate
  modified_base 10: mod_base = OTHER; note = sugar modification: 2'-O-methoxyethylribose; note = backbone modification: 5'-phosphorothioate
  modified_base 11: mod_base = OTHER; mod_base = m5c; note = sugar modification: 2'-O-methoxyethylribose; note = backbone modification: 5'-phosphorothioate
  modified_base 12: mod_base = OTHER; note = sugar modification: 2'-O-methoxyethylribose; note = thymine; note = backbone modification: 5'-phosphorothioate
  modified_base 13: mod_base = OTHER; note = thymine; note = backbone modification: 5'-phosphorothioate; note = sugar modification: lna
  modified_base 14: mod_base = OTHER; mod_base = m5c; note = backbone modification: 5'-phosphorothioate; note = sugar modification: lna
  modified_base 15: mod_base = OTHER; note = sugar modification: lna; note = backbone modification: 5'-phosphorothioate
  modified_base 16: mod_base = OTHER; note = sugar modification: lna; note = thymine
tgttcttgtacttcat

SEQ ID NO: 1035 - RNA, 16 nt, synthetic construct
  source 1..16: mol_type = other RNA; note = Antisense oligonucleotide
  modified_base 1: mod_base = OTHER; note = thymine; note = backbone modification: 5'-phosphorothioate; note = sugar modification: lna
  modified_base 2: mod_base = OTHER; note = sugar modification: lna; note = backbone modification: 5'-phosphorothioate
  modified_base 3: mod_base = OTHER; note = sugar modification: lna; note = thymine; note = backbone modification: 5'-phosphorothioate
  modified_base 4: mod_base = OTHER; note = sugar modification: lna; note = backbone modification: 5'-phosphorothioate; note = thymine
  modified_base 5: mod_base = m5c; mod_base = OTHER; note = sugar modification: lna; note = backbone modification: 5'-phosphorothioate
  modified_base 6: mod_base = OTHER; note = backbone modification: 5'-phosphorothioate; note = sugar modification: 2'-O-methoxyethylribose; note = thymine
  modified_base 7: mod_base = OTHER; note = thymine; note = sugar modification: 2'-O-methoxyethylribose; note = backbone modification: 5'-phosphorothioate
  modified_base 8: mod_base = OTHER; note = backbone modification: 5'-phosphorothioate; note = sugar modification: 2'-O-methoxyethylribose
  modified_base 9: mod_base = OTHER; note = sugar modification: 2'-O-methoxyethylribose; note = backbone modification: 5'-phosphorothioate; note = thymine
  modified_base 10: mod_base = OTHER; note = backbone modification: 5'-phosphorothioate; note = sugar modification: 2'-O-methoxyethylribose
  modified_base 11: mod_base = m5c; mod_base = OTHER; note = sugar modification: 2'-O-methoxyethylribose; note = backbone modification: 5'-phosphorothioate
  modified_base 12: mod_base = OTHER; note = backbone modification: 5'-phosphorothioate; note = thymine; note = sugar modification: lna
  modified_base 13: mod_base = OTHER; note = backbone modification: 5'-phosphorothioate; note = sugar modification: lna; note = thymine
  modified_base 14: mod_base = OTHER; mod_base = m5c; note = sugar modification: lna; note = backbone modification: 5'-phosphorothioate
  modified_base 15: mod_base = OTHER; note = backbone modification: 5'-phosphorothioate; note = sugar modification: lna
  modified_base 16: mod_base = OTHER; note = thymine; note = sugar modification: lna
tgttcttgtacttcat

SEQ ID NO: 1036 - RNA, 16 nt, synthetic construct
  source 1..16: mol_type = other RNA; note = Antisense oligonucleotide
  modified_base 1: mod_base = OTHER; note = sugar modification: 2'-O-methoxyethylribose; note = thymine; note = backbone modification: 5'-phosphorothioate
  modified_base 2: mod_base = OTHER; note = sugar modification: 2'-O-methoxyethylribose; note = backbone modification: 5'-phosphorothioate
  modified_base 3: mod_base = OTHER; note = sugar modification: 2'-O-methoxyethylribose; note = backbone modification: 5'-phosphorothioate; note = thymine
  modified_base 4: mod_base = OTHER; note = backbone modification: 5'-phosphorothioate; note = sugar modification: 2'-O-methoxyethylribose; note = thymine
  modified_base 5: mod_base = OTHER; mod_base = m5c; note = sugar modification: 2'-O-methoxyethylribose; note = backbone modification: 5'-phosphorothioate
  modified_base 6: mod_base = OTHER; note = backbone modification: 5'-phosphorothioate; note = thymine; note = sugar modification: 2'-O-methoxyethylribose
  modified_base 7: mod_base = OTHER; note = sugar modification: 2'-O-methoxyethylribose; note = thymine; note = backbone modification: 5'-phosphorothioate
  modified_base 8: mod_base = OTHER; note = backbone modification: 5'-phosphorothioate; note = sugar modification: 2'-O-methoxyethylribose
  modified_base 9: mod_base = OTHER; note = thymine; note = backbone modification: 5'-phosphorothioate; note = sugar modification: 2'-O-methoxyethylribose
  modified_base 10: mod_base = OTHER; note = sugar modification: 2'-O-methoxyethylribose; note = backbone modification: 5'-phosphorothioate
  modified_base 11: mod_base = m5c; mod_base = OTHER; note = backbone modification: 5'-phosphorothioate; note = sugar modification: 2'-O-methoxyethylribose
  modified_base 12: mod_base = OTHER; note = backbone modification: 5'-phosphorothioate; note = thymine; note = sugar modification: 2'-O-methoxyethylribose
  modified_base 13: mod_base = OTHER; note = backbone modification: 5'-phosphorothioate; note = thymine; note = sugar modification: 2'-O-methoxyethylribose
  modified_base 14: mod_base = OTHER; mod_base = m5c; note = sugar modification: 2'-O-methoxyethylribose; note = backbone modification: 5'-phosphorothioate
  modified_base 15: mod_base = OTHER; note = backbone modification: 5'-phosphorothioate; note = sugar modification: 2'-O-methoxyethylribose
  modified_base 16: mod_base = OTHER; note = sugar modification: lna; note = thymine
tgttcttgtacttcat

SEQ ID NO: 1037 - RNA, 16 nt, synthetic construct
  source 1..16: mol_type = other RNA; note = Antisense oligonucleotide
  modified_base 1: mod_base = OTHER; note = backbone modification: 5'-phosphorothioate; note = sugar modification: 2'-O-methoxyethylribose; note = thymine
  modified_base 2: mod_base = OTHER; note = backbone modification: 5'-phosphorothioate; note = sugar modification: 2'-O-methoxyethylribose
  modified_base 3: mod_base = OTHER; note = thymine; note = backbone modification: 5'-phosphorothioate; note = sugar modification: 2'-O-methoxyethylribose
  modified_base 4: mod_base = OTHER; note = sugar modification: 2'-O-methoxyethylribose; note = backbone modification: 5'-phosphorothioate; note = thymine
  modified_base 5: mod_base = OTHER; mod_base = m5c; note = backbone modification: 5'-phosphorothioate; note = sugar modification: 2'-O-methoxyethylribose
  modified_base 6: mod_base = OTHER; note = backbone modification: 5'-phosphorothioate; note = thymine; note = sugar modification: 2'-O-methoxyethylribose
  modified_base 7: mod_base = OTHER; note = thymine; note = backbone modification: 5'-phosphorothioate; note = sugar modification: 2'-O-methoxyethylribose
  modified_base 8: mod_base = OTHER; note = sugar modification: 2'-O-methoxyethylribose; note = backbone modification: 5'-phosphorothioate
  modified_base 9: mod_base = OTHER; note = backbone modification: 5'-phosphorothioate; note = thymine; note = sugar modification: 2'-O-methoxyethylribose
  modified_base 10: mod_base = OTHER; note = backbone modification: 5'-phosphorothioate; note = sugar modification: 2'-O-methoxyethylribose
  modified_base 11: mod_base = OTHER; mod_base = m5c; note = sugar modification: 2'-O-methoxyethylribose; note = backbone modification: 5'-phosphorothioate
  modified_base 12: mod_base = OTHER; note = thymine; note = sugar modification: 2'-O-methoxyethylribose; note = backbone modification: 5'-phosphorothioate
  modified_base 13: mod_base = OTHER; note = sugar modification: 2'-O-methoxyethylribose; note = thymine; note = backbone modification: 5'-phosphorothioate
  modified_base 14: mod_base = m5c; mod_base = OTHER; note = backbone modification: 5'-phosphorothioate; note = sugar modification: 2'-O-methoxyethylribose
  modified_base 15: mod_base = OTHER; note = backbone modification: 5'-phosphorothioate; note = sugar modification: lna
  modified_base 16: mod_base = OTHER; note = sugar modification: lna; note = thymine
tgttcttgtacttcat

SEQ ID NO: 1038 - RNA, 16 nt, synthetic construct
  source 1..16: mol_type = other RNA; note = Antisense oligonucleotide
  modified_base 1: mod_base = OTHER; note = sugar modification: 2'-O-methoxyethylribose; note = backbone modification: 5'-phosphorothioate; note = thymine
  modified_base 2: mod_base = OTHER; note = backbone modification: 5'-phosphorothioate; note = sugar modification: 2'-O-methoxyethylribose
  modified_base 3: mod_base = OTHER; note = backbone modification: 5'-phosphorothioate; note = thymine; note = sugar modification: 2'-O-methoxyethylribose
  modified_base 4: mod_base = OTHER; note = thymine; note = sugar modification: 2'-O-methoxyethylribose; note = backbone modification: 5'-phosphorothioate
  modified_base 5: mod_base = m5c; mod_base = OTHER; note = backbone modification: 5'-phosphorothioate; note = sugar modification: 2'-O-methoxyethylribose
  modified_base 6: mod_base = OTHER; note = thymine; note = backbone modification: 5'-phosphorothioate; note = sugar modification: 2'-O-methoxyethylribose
  modified_base 7: mod_base = OTHER; note = backbone modification: 5'-phosphorothioate; note = sugar modification: 2'-O-methoxyethylribose; note = thymine
  modified_base 8: mod_base = OTHER; note = sugar modification: 2'-O-methoxyethylribose; note = backbone modification: 5'-phosphorothioate
  modified_base 9: mod_base = OTHER; note = sugar modification: 2'-O-methoxyethylribose; note = backbone modification: 5'-phosphorothioate; note = thymine
  modified_base 10: mod_base = OTHER; note = backbone modification: 5'-phosphorothioate; note = sugar modification: 2'-O-methoxyethylribose
  modified_base 11: mod_base = OTHER; mod_base = m5c; note = backbone modification: 5'-phosphorothioate; note = sugar modification: 2'-O-methoxyethylribose
  modified_base 12: mod_base = OTHER; note = backbone modification: 5'-phosphorothioate; note = sugar modification: 2'-O-methoxyethylribose; note = thymine
  modified_base 13: mod_base = OTHER; note = thymine; note = sugar modification: 2'-O-methoxyethylribose; note = backbone modification: 5'-phosphorothioate
  modified_base 14: mod_base = m5c; mod_base = OTHER; note = sugar modification: lna; note = backbone modification: 5'-phosphorothioate
  modified_base 15: mod_base = OTHER; note = sugar modification: lna; note = backbone modification: 5'-phosphorothioate
  modified_base 16: mod_base = OTHER; note = thymine; note = sugar modification: lna
tgttcttgtacttcat

SEQ ID NO: 1039 - RNA, 16 nt, synthetic construct
  source 1..16: mol_type = other RNA; note = Antisense oligonucleotide
  modified_base 1: mod_base = OTHER; note = backbone modification: 5'-phosphorothioate; note = sugar modification: lna
  modified_base 2: mod_base = OTHER; note = sugar modification: lna; note = backbone modification: 5'-phosphorothioate; note = thymine
  modified_base 3: mod_base = OTHER; note = sugar modification: lna; note = backbone modification: 5'-phosphorothioate
  modified_base 4: mod_base = OTHER; note = sugar modification: 2'-O-methoxyethylribose; note = backbone modification: 5'-phosphorothioate; note = thymine
  modified_base 5: mod_base = OTHER; note = sugar modification: 2'-O-methoxyethylribose; note = thymine; note = backbone modification: 5'-phosphorothioate
  modified_base 6: mod_base = OTHER; mod_base = m5c; note = backbone modification: 5'-phosphorothioate; note = sugar modification: 2'-O-methoxyethylribose
  modified_base 7: mod_base = OTHER; note = sugar modification: 2'-O-methoxyethylribose; note = thymine; note = backbone modification: 5'-phosphorothioate
  modified_base 8: mod_base = OTHER; note = sugar modification: 2'-O-methoxyethylribose; note = backbone modification: 5'-phosphorothioate; note = thymine
  modified_base 9: mod_base = OTHER; note = backbone modification: 5'-phosphorothioate; note = sugar modification: 2'-O-methoxyethylribose
  modified_base 10: mod_base = OTHER; note = backbone modification: 5'-phosphorothioate; note = sugar modification: 2'-O-methoxyethylribose; note = thymine
  modified_base 11: mod_base = OTHER; note = sugar modification: 2'-O-methoxyethylribose; note = backbone modification: 5'-phosphorothioate
  modified_base 12: mod_base = OTHER; mod_base = m5c; note = sugar modification: 2'-O-methoxyethylribose; note = backbone modification: 5'-phosphorothioate
  modified_base 13: mod_base = OTHER; note = sugar modification: 2'-O-methoxyethylribose; note = thymine; note = backbone modification: 5'-phosphorothioate
  modified_base 14: mod_base = OTHER; note = sugar modification: lna; note = thymine; note = backbone modification: 5'-phosphorothioate
  modified_base 15: mod_base = OTHER; mod_base = m5c; note = backbone modification: 5'-phosphorothioate; note = sugar modification: lna
  modified_base 16: mod_base = OTHER; note = sugar modification: lna
gtgttcttgtacttca

SEQ ID NO: 1040 - RNA, 16 nt, synthetic construct
  source 1..16: mol_type = other RNA; note = Antisense oligonucleotide
  modified_base 1: mod_base = OTHER; note = backbone modification: 5'-phosphorothioate; note = sugar modification: lna
  modified_base 2: mod_base = OTHER; note = sugar modification: 2'-O-methoxyethylribose; note = backbone modification: 5'-phosphorothioate; note = thymine
  modified_base 3: mod_base = OTHER; note = backbone modification: 5'-phosphorothioate; note = sugar modification: 2'-O-methoxyethylribose
  modified_base 4: mod_base = OTHER; note = backbone modification: 5'-phosphorothioate; note = thymine; note = sugar modification: 2'-O-methoxyethylribose
  modified_base 5: mod_base = OTHER; note = backbone modification: 5'-phosphorothioate; note = sugar modification: 2'-O-methoxyethylribose; note = thymine
  modified_base 6: mod_base = m5c; mod_base = OTHER; note = backbone modification: 5'-phosphorothioate; note = sugar modification: 2'-O-methoxyethylribose
  modified_base 7: mod_base = OTHER; note = thymine; note = sugar modification: 2'-O-methoxyethylribose; note = backbone modification: 5'-phosphorothioate
  modified_base 8: mod_base = OTHER; note = thymine; note = sugar modification: 2'-O-methoxyethylribose; note = backbone modification: 5'-phosphorothioate
  modified_base 9: mod_base = OTHER; note = backbone modification: 5'-phosphorothioate; note = sugar modification: 2'-O-methoxyethylribose
  modified_base 10: mod_base = OTHER; note = thymine; note = backbone modification: 5'-phosphorothioate; note = sugar modification: 2'-O-methoxyethylribose
  modified_base 11: mod_base = OTHER; note = backbone modification: 5'-phosphorothioate; note = sugar modification: 2'-O-methoxyethylribose
  modified_base 12: mod_base = OTHER; mod_base = m5c; note = sugar modification: 2'-O-methoxyethylribose; note = backbone modification: 5'-phosphorothioate
  modified_base 13: mod_base = OTHER; note = backbone modification: 5'-phosphorothioate; note = sugar modification: 2'-O-methoxyethylribose; note = thymine
  modified_base 14: mod_base = OTHER; note = thymine; note = sugar modification: 2'-O-methoxyethylribose; note = backbone modification: 5'-phosphorothioate
  modified_base 15: mod_base = m5c; mod_base = OTHER; note = sugar modification: 2'-O-methoxyethylribose; note = backbone modification: 5'-phosphorothioate
  modified_base 16: mod_base = OTHER; note = sugar modification: 2'-O-methoxyethylribose
gtgttcttgtacttca

SEQ ID NO: 1041 - RNA, 16 nt, synthetic construct
  source 1..16: mol_type = other RNA; note = Antisense oligonucleotide
  modified_base 1: mod_base = OTHER; note = backbone modification: 5'-phosphorothioate; note = sugar modification: lna
  modified_base 2: mod_base = OTHER; note = thymine; note = sugar modification: lna; note = backbone modification: 5'-phosphorothioate
  modified_base 3: mod_base = OTHER; note = sugar modification: 2'-O-methoxyethylribose; note = backbone modification: 5'-phosphorothioate
  modified_base 4: mod_base = OTHER; note = sugar modification: 2'-O-methoxyethylribose; note = thymine; note = backbone modification: 5'-phosphorothioate
  modified_base 5: mod_base = OTHER; note = thymine; note = backbone modification: 5'-phosphorothioate; note = sugar modification: 2'-O-methoxyethylribose
  modified_base 6: mod_base = m5c; mod_base = OTHER; note = sugar modification: 2'-O-methoxyethylribose; note = backbone modification: 5'-phosphorothioate
  modified_base 7: mod_base = OTHER; note = thymine; note = backbone modification: 5'-phosphorothioate; note = sugar modification: 2'-O-methoxyethylribose
  modified_base 8: mod_base = OTHER; note = sugar modification: 2'-O-methoxyethylribose; note = thymine; note = backbone modification: 5'-phosphorothioate
  modified_base 9: mod_base = OTHER; note = sugar modification: 2'-O-methoxyethylribose; note = backbone modification: 5'-phosphorothioate
  modified_base 10: mod_base = OTHER; note = backbone modification: 5'-phosphorothioate; note = thymine; note = sugar modification: 2'-O-methoxyethylribose
  modified_base 11: mod_base = OTHER; note = backbone modification: 5'-phosphorothioate; note = sugar modification: 2'-O-methoxyethylribose
  modified_base 12: mod_base = OTHER; mod_base = m5c; note = backbone modification: 5'-phosphorothioate; note = sugar modification: 2'-O-methoxyethylribose
  modified_base 13: mod_base = OTHER; note = sugar modification: 2'-O-methoxyethylribose; note = thymine; note = backbone modification: 5'-phosphorothioate
  modified_base 14: mod_base = OTHER; note = thymine; note = backbone modification: 5'-phosphorothioate; note = sugar modification: 2'-O-methoxyethylribose
  modified_base 15: mod_base = m5c; mod_base = OTHER; note = sugar modification: 2'-O-methoxyethylribose; note = backbone modification: 5'-phosphorothioate
  modified_base 16: mod_base = OTHER; note = sugar modification: 2'-O-methoxyethylribose
gtgttcttgtacttca

SEQ ID NO: 1042 - RNA, 16 nt, synthetic construct
  source 1..16: mol_type = other RNA; note = Antisense oligonucleotide
  modified_base 1: mod_base = OTHER; note = backbone modification: 5'-phosphorothioate; note = sugar modification: lna
  modified_base 2: mod_base = OTHER; note = thymine; note = sugar modification: lna; note = backbone modification: 5'-phosphorothioate
  modified_base 3: mod_base = OTHER; note = backbone modification: 5'-phosphorothioate; note = sugar modification: lna
  modified_base 4: mod_base = OTHER; note = sugar modification: 2'-O-methoxyethylribose; note = backbone modification: 5'-phosphorothioate; note = thymine
  modified_base 5: mod_base = OTHER; note = backbone modification: 5'-phosphorothioate; note = sugar modification: 2'-O-methoxyethylribose; note = thymine
  modified_base 6: mod_base = OTHER; mod_base = m5c; note = sugar modification: 2'-O-methoxyethylribose; note = backbone modification: 5'-phosphorothioate
  modified_base 7: mod_base = OTHER; note = backbone modification: 5'-phosphorothioate; note = thymine; note = sugar modification: 2'-O-methoxyethylribose
  modified_base 8: mod_base = OTHER; note = backbone modification: 5'-phosphorothioate; note = thymine; note = sugar modification: 2'-O-methoxyethylribose
  modified_base 9: mod_base = OTHER; note = sugar modification: 2'-O-methoxyethylribose; note = backbone modification: 5'-phosphorothioate
  modified_base 10: mod_base = OTHER; note = backbone modification: 5'-phosphorothioate; note = thymine; note = sugar modification: 2'-O-methoxyethylribose
  modified_base 11: mod_base = OTHER; note = sugar modification: 2'-O-methoxyethylribose; note = backbone modification: 5'-phosphorothioate
  modified_base 12: mod_base = m5c; mod_base = OTHER; note = backbone modification: 5'-phosphorothioate; note = sugar modification: 2'-O-methoxyethylribose
  modified_base 13: mod_base = OTHER; note = thymine; note = backbone modification: 5'-phosphorothioate; note = sugar modification: 2'-O-methoxyethylribose
  modified_base 14: mod_base = OTHER; note = backbone modification: 5'-phosphorothioate; note = sugar modification: 2'-O-methoxyethylribose; note = thymine
  modified_base 15: mod_base = OTHER; mod_base = m5c; note = backbone modification: 5'-phosphorothioate; note = sugar modification: 2'-O-methoxyethylribose
  modified_base 16: mod_base = OTHER; note = sugar modification: 2'-O-methoxyethylribose
gtgttcttgtacttca

SEQ ID NO: 1043 - RNA, 16 nt, synthetic construct
  source 1..16: mol_type = other RNA; note = Antisense oligonucleotide
  modified_base 1: mod_base = OTHER; note = sugar modification: lna; note = backbone modification: 5'-phosphorothioate
  modified_base 2: mod_base = OTHER; note = sugar modification: lna; note = backbone modification: 5'-phosphorothioate; note = thymine
  modified_base 3: mod_base = OTHER; note = backbone modification: 5'-phosphorothioate; note = sugar modification: 2'-O-methoxyethylribose
  modified_base 4: mod_base = OTHER; note = backbone modification: 5'-phosphorothioate; note = sugar modification: 2'-O-methoxyethylribose; note = thymine
  modified_base 5: mod_base = OTHER; note = sugar modification: 2'-O-methoxyethylribose; note = thymine; note = backbone modification: 5'-phosphorothioate
  modified_base 6: mod_base = m5c; mod_base = OTHER; note = backbone modification: 5'-phosphorothioate; note = sugar modification: 2'-O-methoxyethylribose
  modified_base 7: mod_base = OTHER; note = thymine; note = sugar modification: 2'-O-methoxyethylribose; note = backbone modification: 5'-phosphorothioate
  modified_base 8: mod_base = OTHER; note = backbone modification: 5'-phosphorothioate; note = sugar modification: 2'-O-methoxyethylribose; note = thymine
  modified_base 9: mod_base = OTHER; note = backbone modification: 5'-phosphorothioate; note = sugar modification: 2'-O-methoxyethylribose
  modified_base 10: mod_base = OTHER; note = thymine; note = backbone modification: 5'-phosphorothioate; note = sugar modification: 2'-O-methoxyethylribose
  modified_base 11: mod_base = OTHER; note = sugar modification: 2'-O-methoxyethylribose; note = backbone modification: 5'-phosphorothioate
  modified_base 12: mod_base = m5c; mod_base = OTHER; note = backbone modification: 5'-phosphorothioate; note = sugar modification: 2'-O-methoxyethylribose
  modified_base 13: mod_base = OTHER; note = thymine; note = backbone modification: 5'-phosphorothioate; note = sugar modification: 2'-O-methoxyethylribose
  modified_base 14: mod_base = OTHER; note = sugar modification: 2'-O-methoxyethylribose; note = thymine; note = backbone modification: 5'-phosphorothioate
  modified_base 15: mod_base = m5c; mod_base = OTHER; note = sugar modification: 2'-O-methoxyethylribose; note = backbone modification: 5'-phosphorothioate
  modified_base 16: mod_base = OTHER; note = sugar modification: lna
gtgttcttgtacttca

SEQ ID NO: 1044 - RNA, 16 nt, synthetic construct
  source 1..16: mol_type = other RNA; note = Antisense oligonucleotide
  modified_base 1: mod_base = OTHER; note = sugar modification: lna; note = backbone modification: 5'-phosphorothioate
  modified_base 2: mod_base = OTHER; note = sugar modification: lna; note = backbone modification: 5'-phosphorothioate; note = thymine
  modified_base 3: mod_base = OTHER; note = backbone modification: 5'-phosphorothioate; note = sugar modification: lna
  modified_base 4: mod_base = OTHER; note = thymine; note = backbone modification: 5'-phosphorothioate; note = sugar modification: 2'-O-methoxyethylribose
  modified_base 5: mod_base = OTHER; note = thymine; note = sugar modification: 2'-O-methoxyethylribose; note = backbone modification: 5'-phosphorothioate
  modified_base 6: mod_base = OTHER; mod_base = m5c; note = backbone modification: 5'-phosphorothioate; note = sugar modification: 2'-O-methoxyethylribose
  modified_base 7: mod_base = OTHER; note = sugar modification: 2'-O-methoxyethylribose; note = thymine; note = backbone modification: 5'-phosphorothioate
  modified_base 8: mod_base = OTHER; note = thymine; note = backbone modification: 5'-phosphorothioate; note = sugar modification: 2'-O-methoxyethylribose
  modified_base 9: mod_base = OTHER; note = backbone modification: 5'-phosphorothioate; note = sugar modification: 2'-O-methoxyethylribose
  modified_base 10: mod_base = OTHER; note = sugar modification: 2'-O-methoxyethylribose; note = thymine; note = backbone modification: 5'-phosphorothioate
  modified_base 11: mod_base = OTHER; note = sugar modification: 2'-O-methoxyethylribose; note = backbone modification: 5'-phosphorothioate
  modified_base 12: mod_base = m5c; mod_base = OTHER; note = backbone modification: 5'-phosphorothioate; note = sugar modification: 2'-O-methoxyethylribose
  modified_base 13: mod_base = OTHER; note = backbone modification: 5'-phosphorothioate; note = thymine; note = sugar modification: 2'-O-methoxyethylribose
  modified_base 14: mod_base = OTHER; note = thymine; note = backbone modification: 5'-phosphorothioate; note = sugar modification: 2'-O-methoxyethylribose
  modified_base 15: mod_base = m5c; mod_base = OTHER; note = backbone modification: 5'-phosphorothioate; note = sugar modification: 2'-O-methoxyethylribose
  modified_base 16: mod_base = OTHER; note = sugar modification: lna
gtgttcttgtacttca

SEQ ID NO: 1045 - RNA, 16 nt, synthetic construct
  source 1..16: mol_type = other RNA; note = Antisense oligonucleotide
  modified_base 1: mod_base = OTHER; note = backbone modification: 5'-phosphorothioate; note = sugar modification: lna
  modified_base 2: mod_base = OTHER; note = backbone modification: 5'-phosphorothioate; note = sugar modification: 2'-O-methoxyethylribose; note = thymine
  modified_base 3: mod_base = OTHER; note = sugar modification: 2'-O-methoxyethylribose; note = backbone modification: 5'-phosphorothioate
  modified_base 4: mod_base = OTHER; note = thymine; note = backbone modification: 5'-phosphorothioate; note = sugar modification: 2'-O-methoxyethylribose
  modified_base 5: mod_base = OTHER; note = sugar modification: 2'-O-methoxyethylribose; note = thymine; note = backbone modification: 5'-phosphorothioate
  modified_base 6: mod_base = OTHER; mod_base = m5c; note = backbone modification: 5'-phosphorothioate; note = sugar modification: 2'-O-methoxyethylribose
  modified_base 7: mod_base = OTHER; note = thymine; note = sugar modification: 2'-O-methoxyethylribose; note = backbone modification: 5'-phosphorothioate
  modified_base 8: mod_base = OTHER; note = thymine; note = backbone modification: 5'-phosphorothioate; note = sugar modification: 2'-O-methoxyethylribose
  modified_base 9: mod_base = OTHER; note = backbone modification: 5'-phosphorothioate; note = sugar modification: 2'-O-methoxyethylribose
  modified_base 10: mod_base = OTHER; note = backbone modification: 5'-phosphorothioate; note = sugar modification: 2'-O-methoxyethylribose; note = thymine
  modified_base 11: mod_base = OTHER; note = sugar modification: 2'-O-methoxyethylribose; note = backbone modification: 5'-phosphorothioate
  modified_base 12: mod_base = m5c; mod_base = OTHER; note = backbone modification: 5'-phosphorothioate; note = sugar modification: 2'-O-methoxyethylribose
  modified_base 13: mod_base = OTHER; note = backbone modification: 5'-phosphorothioate; note = thymine; note = sugar modification: 2'-O-methoxyethylribose
  modified_base 14: mod_base = OTHER; note = sugar modification: 2'-O-methoxyethylribose; note = backbone modification: 5'-phosphorothioate; note = thymine
  modified_base 15: mod_base = OTHER; mod_base = m5c; note = backbone modification: 5'-phosphorothioate; note = sugar modification: lna
  modified_base 16: mod_base = OTHER; note = sugar modification: lna
gtgttcttgtacttca

SEQ ID NO: 1046 - RNA, 16 nt, synthetic construct
  source 1..16: mol_type = other RNA; note = Antisense oligonucleotide
  modified_base 1: mod_base = OTHER; note = sugar modification: lna; note = backbone modification: 5'-phosphorothioate
  modified_base 2: mod_base = OTHER; note = backbone modification: 5'-phosphorothioate; note = sugar modification: lna; note = thymine
  modified_base 3: mod_base = OTHER; note = backbone modification: 5'-phosphorothioate; note = sugar modification: lna
  modified_base 4: mod_base = OTHER; note = thymine; note = backbone modification: 5'-phosphorothioate; note = sugar modification: 2'-O-methoxyethylribose
  modified_base 5: mod_base = OTHER; note = thymine; note = backbone modification: 5'-phosphorothioate; note = sugar modification: 2'-O-methoxyethylribose
  modified_base 6: mod_base = m5c; mod_base = OTHER; note = sugar modification: 2'-O-methoxyethylribose; note = backbone modification: 5'-phosphorothioate
  modified_base 7: mod_base = OTHER; note = sugar modification: 2'-O-methoxyethylribose; note = backbone modification: 5'-phosphorothioate; note = thymine
  modified_base 8: mod_base = OTHER; note = sugar modification: 2'-O-methoxyethylribose; note = backbone modification: 5'-phosphorothioate; note = thymine
  modified_base 9: mod_base = OTHER; note = backbone modification: 5'-phosphorothioate; note = sugar modification: 2'-O-methoxyethylribose
  modified_base 10: mod_base = OTHER; note = sugar modification: 2'-O-methoxyethylribose; note = thymine; note = backbone modification: 5'-phosphorothioate
  modified_base 11: mod_base = OTHER; note = backbone modification: 5'-phosphorothioate; note = sugar modification: 2'-O-methoxyethylribose
  modified_base 12: mod_base = OTHER; mod_base = m5c; note = sugar modification: 2'-O-methoxyethylribose; note = backbone modification: 5'-phosphorothioate
  modified_base 13: mod_base = OTHER; note = sugar modification: 2'-O-methoxyethylribose; note = backbone modification: 5'-phosphorothioate; note = thymine
  modified_base 14: mod_base = OTHER; note = sugar modification: 2'-O-methoxyethylribose; note = backbone modification: 5'-phosphorothioate; note = thymine
  modified_base 15: mod_base = OTHER; mod_base = m5c; note = sugar modification: lna; note = backbone modification: 5'-phosphorothioate
  modified_base 16: mod_base = OTHER; note = sugar modification: lna
gtgttcttgtacttca

SEQ ID NO: 1047 - RNA, 16 nt, synthetic construct
  source 1..16: mol_type = other RNA; note = Antisense oligonucleotide
  modified_base 1: mod_base = OTHER; note = sugar modification: lna; note = backbone modification: 5'-phosphorothioate
  modified_base 2: mod_base = OTHER; note = thymine; note = sugar modification: lna; note = backbone modification: 5'-phosphorothioate
  modified_base 3: mod_base = OTHER; note = backbone modification: 5'-phosphorothioate; note = sugar modification: lna
  modified_base 4: mod_base = OTHER; note = thymine; note = sugar modification: lna; note = backbone modification: 5'-phosphorothioate
  modified_base 5: mod_base = OTHER; note = sugar modification: 2'-O-methoxyethylribose; note = backbone modification: 5'-phosphorothioate; note = thymine
  modified_base 6: mod_base = OTHER; mod_base = m5c; note = sugar modification: 2'-O-methoxyethylribose; note = backbone modification: 5'-phosphorothioate
  modified_base 7: mod_base = OTHER; note = sugar modification: 2'-O-methoxyethylribose; note = thymine; note = backbone modification: 5'-phosphorothioate
  modified_base 8: mod_base = OTHER; note = sugar modification: 2'-O-methoxyethylribose; note = thymine; note = backbone modification: 5'-phosphorothioate
  modified_base 9: mod_base = OTHER; note = backbone modification: 5'-phosphorothioate; note = sugar modification: 2'-O-methoxyethylribose
  modified_base 10: mod_base = OTHER; note = sugar modification: 2'-O-methoxyethylribose; note = thymine; note = backbone modification: 5'-phosphorothioate
  modified_base 11: mod_base = OTHER; note = sugar modification: 2'-O-methoxyethylribose; note = backbone modification: 5'-phosphorothioate
  modified_base 12: mod_base = OTHER; mod_base = m5c; note = sugar modification: 2'-O-methoxyethylribose; note = backbone modification: 5'-phosphorothioate
  modified_base 13: mod_base = OTHER; note = sugar modification: 2'-O-methoxyethylribose; note = backbone modification: 5'-phosphorothioate; note = thymine
  modified_base 14: mod_base = OTHER; note = sugar modification: 2'-O-methoxyethylribose; note = thymine; note = backbone modification: 5'-phosphorothioate
  modified_base 15: mod_base = OTHER; mod_base = m5c; note = backbone modification: 5'-phosphorothioate; note = sugar modification: lna
  modified_base 16: mod_base = OTHER; note = sugar modification: lna
gtgttcttgtacttca

SEQ ID NO: 1048 - RNA, 16 nt, synthetic construct
  source 1..16: mol_type = other RNA; note = Antisense oligonucleotide
  modified_base 1: mod_base = OTHER; note = sugar modification: lna; note = backbone modification: 5'-phosphorothioate
  modified_base 2: mod_base = OTHER; note = sugar modification: 2'-O-methoxyethylribose; note = backbone modification: 5'-phosphorothioate; note = thymine
  modified_base 3: mod_base = OTHER; note = backbone modification: 5'-phosphorothioate; note = sugar modification: 2'-O-methoxyethylribose
  modified_base 4: mod_base = OTHER; note = backbone modification: 5'-phosphorothioate; note = sugar modification: 2'-O-methoxyethylribose; note = thymine
  modified_base 5: mod_base = OTHER; note = sugar modification: 2'-O-methoxyethylribose; note = thymine; note = backbone modification: 5'-phosphorothioate
  modified_base 6: mod_base = m5c; mod_base = OTHER; note = sugar modification: 2'-O-methoxyethylribose; note = backbone modification: 5'-phosphorothioate
  modified_base 7: mod_base = OTHER; note = sugar modification: 2'-O-methoxyethylribose; note = backbone modification: 5'-phosphorothioate; note = thymine
  modified_base 8: mod_base = OTHER; note = sugar modification: 2'-O-methoxyethylribose; note = backbone modification: 5'-phosphorothioate; note = thymine
  modified_base 9: mod_base = OTHER; note = backbone modification: 5'-phosphorothioate; note = sugar modification: 2'-O-methoxyethylribose
  modified_base 10: mod_base = OTHER; note = thymine; note = backbone modification: 5'-phosphorothioate; note = sugar modification: 2'-O-methoxyethylribose
  modified_base 11: mod_base = OTHER; note = sugar modification: 2'-O-methoxyethylribose; note = backbone modification: 5'-phosphorothioate
  modified_base 12: mod_base = m5c; mod_base = OTHER; note = sugar modification: 2'-O-methoxyethylribose; note = backbone modification: 5'-phosphorothioate
  modified_base 13: mod_base = OTHER; note = thymine; note = sugar modification: 2'-O-methoxyethylribose; note = backbone modification: 5'-phosphorothioate
  modified_base 14: mod_base = OTHER; note = sugar modification: lna; note = thymine; note = backbone modification: 5'-phosphorothioate
  modified_base 15: mod_base = m5c; mod_base = OTHER; note = sugar modification: lna; note = backbone modification: 5'-phosphorothioate
  modified_base 16: mod_base = OTHER; note = sugar modification: lna
gtgttcttgtacttca

SEQ ID NO: 1049 - RNA, 16 nt, synthetic construct
  source 1..16: mol_type = other RNA; note = Antisense oligonucleotide
  modified_base 1: mod_base = OTHER; note = sugar modification: lna; note = backbone modification: 5'-phosphorothioate
  modified_base 2: mod_base = OTHER; note = thymine; note = backbone modification: 5'-phosphorothioate; note = sugar modification: lna
  modified_base 3: mod_base = OTHER; note = sugar modification: 2'-O-methoxyethylribose; note = backbone modification: 5'-phosphorothioate
  modified_base 4: mod_base = OTHER; note = thymine; note = sugar modification: 2'-O-methoxyethylribose; note = backbone modification: 5'-phosphorothioate
  modified_base 5: mod_base = OTHER; note = thymine; note = sugar modification: 2'-O-methoxyethylribose; note = backbone modification: 5'-phosphorothioate
  modified_base 6: mod_base = m5c; mod_base = OTHER; note = sugar modification: 2'-O-methoxyethylribose; note = backbone modification: 5'-phosphorothioate
  modified_base 7: mod_base = OTHER; note = sugar modification: 2'-O-methoxyethylribose; note = thymine; note = backbone modification: 5'-phosphorothioate
  modified_base 8: mod_base = OTHER; note = backbone modification: 5'-phosphorothioate; note = sugar modification: 2'-O-methoxyethylribose; note = thymine
  modified_base 9: mod_base = OTHER; note = backbone modification: 5'-phosphorothioate; note = sugar modification: 2'-O-methoxyethylribose
  modified_base 10: mod_base = OTHER; note = sugar modification: 2'-O-methoxyethylribose; note = thymine; note = backbone modification: 5'-phosphorothioate
  modified_base 11: mod_base = OTHER; note = backbone modification: 5'-phosphorothioate; note = sugar modification: 2'-O-methoxyethylribose
  modified_base 12: mod_base = m5c; mod_base = OTHER; note = backbone modification: 5'-phosphorothioate; note = sugar modification: 2'-O-methoxyethylribose
  modified_base 13: mod_base = OTHER; note = thymine; note = backbone modification: 5'-phosphorothioate; note = sugar modification: 2'-O-methoxyethylribose
  modified_base 14: mod_base = OTHER; note = thymine; note = backbone modification: 5'-phosphorothioate; note = sugar modification: lna
  modified_base 15: mod_base = OTHER; mod_base = m5c; note = sugar modification: lna; note = backbone modification: 5'-phosphorothioate
  modified_base 16: mod_base = OTHER; note = sugar modification: lna
gtgttcttgtacttca

SEQ ID NO: 1050 - RNA, 16 nt, synthetic construct
  source 1..16: mol_type = other RNA; note = Antisense oligonucleotide
  modified_base 1: mod_base = OTHER; note = sugar modification: lna; note = backbone modification: 5'-phosphorothioate
  modified_base 2: mod_base = OTHER; note = sugar modification: lna; note = thymine; note = backbone modification: 5'-phosphorothioate
  modified_base 3: mod_base = OTHER; note = sugar modification: lna; note = backbone modification: 5'-phosphorothioate
  modified_base 4: mod_base = OTHER; note = sugar modification: lna; note = thymine; note = backbone modification: 5'-phosphorothioate
  modified_base 5: mod_base = OTHER; note = thymine; note = sugar modification: 2'-O-methoxyethylribose; note = backbone modification: 5'-phosphorothioate
  modified_base 6: mod_base = OTHER; mod_base = m5c; note = sugar modification: 2'-O-methoxyethylribose; note = backbone modification: 5'-phosphorothioate
  modified_base 7: mod_base = OTHER; note = thymine; note = sugar modification: 2'-O-methoxyethylribose; note = backbone modification: 5'-phosphorothioate
  modified_base 8: mod_base = OTHER; note = sugar modification: 2'-O-methoxyethylribose; note = thymine; note = backbone modification: 5'-phosphorothioate
  modified_base 9: mod_base = OTHER; note = backbone modification: 5'-phosphorothioate; note = sugar modification: 2'-O-methoxyethylribose
  modified_base 10: mod_base = OTHER; note = thymine; note = backbone modification: 5'-phosphorothioate; note = sugar modification: 2'-O-methoxyethylribose
  modified_base 11: mod_base = OTHER; note = backbone modification: 5'-phosphorothioate; note = sugar modification: 2'-O-methoxyethylribose
  modified_base 12: mod_base = m5c; mod_base = OTHER; note = backbone modification: 5'-phosphorothioate; note = sugar modification: 2'-O-methoxyethylribose
  modified_base 13: mod_base = OTHER; note = sugar modification: 2'-O-methoxyethylribose; note = thymine; note = backbone modification: 5'-phosphorothioate
  modified_base 14: mod_base = OTHER; note = backbone modification: 5'-phosphorothioate; note = thymine; note = sugar modification: lna
  modified_base 15: mod_base = m5c; mod_base = OTHER; note = backbone modification: 5'-phosphorothioate; note = sugar modification: lna
  modified_base 16: mod_base = OTHER; note = sugar modification: lna
gtgttcttgtacttca

SEQ ID NO: 1051 - RNA, 16 nt, synthetic construct
  source 1..16: mol_type = other RNA; note = Antisense oligonucleotide
  modified_base 1: mod_base = OTHER; note = backbone modification: 5'-phosphorothioate; note = sugar modification: lna
  modified_base 2: mod_base = OTHER; note = thymine; note = sugar modification: lna; note = backbone modification: 5'-phosphorothioate
  modified_base 3: mod_base = OTHER; note = backbone modification: 5'-phosphorothioate; note = sugar modification: 2'-O-methoxyethylribose
  modified_base 4: mod_base = OTHER; note = sugar modification: 2'-O-methoxyethylribose; note = backbone modification: 5'-phosphorothioate; note = thymine
  modified_base 5: mod_base = OTHER; note = thymine; note = sugar modification: 2'-O-methoxyethylribose; note = backbone modification: 5'-phosphorothioate
  modified_base 6: mod_base = OTHER; mod_base = m5c; note = sugar modification: 2'-O-methoxyethylribose; note = backbone modification: 5'-phosphorothioate
  modified_base 7: mod_base = OTHER; note = sugar modification: 2'-O-methoxyethylribose; note = backbone modification: 5'-phosphorothioate; note = thymine
  modified_base 8: mod_base = OTHER; note = thymine; note = sugar modification: 2'-O-methoxyethylribose; note = backbone modification: 5'-phosphorothioate
  modified_base 9: mod_base = OTHER; note = backbone modification: 5'-phosphorothioate; note = sugar modification: 2'-O-methoxyethylribose
  modified_base 10: mod_base = OTHER; note = sugar modification: 2'-O-methoxyethylribose; note = thymine; note = backbone modification: 5'-phosphorothioate
  modified_base 11: mod_base = OTHER; note = backbone modification: 5'-phosphorothioate; note = sugar modification: 2'-O-methoxyethylribose
  modified_base 12: mod_base = m5c; mod_base = OTHER; note = sugar modification: 2'-O-methoxyethylribose; note = backbone modification: 5'-phosphorothioate
  modified_base 13: mod_base = OTHER; note = backbone modification: 5'-phosphorothioate; note = sugar modification: lna; note = thymine
  modified_base 14: mod_base = OTHER; note = thymine; note = sugar modification: lna; note = backbone modification: 5'-phosphorothioate
  modified_base 15: mod_base = OTHER; mod_base = m5c; note = sugar modification: lna; note = backbone modification: 5'-phosphorothioate
  modified_base 16: mod_base = OTHER; note = sugar modification: lna
gtgttcttgtacttca

SEQ ID NO: 1052 - RNA, 16 nt, synthetic construct
  source 1..16: mol_type = other RNA; note = Antisense oligonucleotide
  modified_base 1: mod_base = OTHER; note = sugar modification: lna; note = backbone modification: 5'-phosphorothioate
  modified_base 2: mod_base = OTHER; note = backbone modification: 5'-phosphorothioate; note = thymine; note = sugar modification: lna
  modified_base 3: mod_base = OTHER; note = sugar modification: lna; note = backbone modification: 5'-phosphorothioate
  modified_base 4: mod_base = OTHER; note = sugar modification: 2'-O-methoxyethylribose; note = backbone modification: 5'-phosphorothioate; note = thymine
  modified_base 5: mod_base = OTHER; note = sugar modification: 2'-O-methoxyethylribose; note = backbone modification: 5'-phosphorothioate; note = thymine
  modified_base 6: mod_base = m5c; mod_base = OTHER; note = sugar modification: 2'-O-methoxyethylribose; note = backbone modification: 5'-phosphorothioate
  modified_base 7: mod_base = OTHER; note = backbone modification: 5'-phosphorothioate; note = thymine; note = sugar modification: 2'-O-methoxyethylribose
  modified_base 8: mod_base = OTHER; note = sugar modification: 2'-O-methoxyethylribose; note = backbone modification: 5'-phosphorothioate; note = thymine
  modified_base 9: mod_base = OTHER; note = backbone modification: 5'-phosphorothioate; note = sugar modification: 2'-O-methoxyethylribose
  modified_base 10: mod_base = OTHER; note = thymine; note = backbone modification: 5'-phosphorothioate; note = sugar modification: 2'-O-methoxyethylribose
  modified_base 11: mod_base = OTHER; note = backbone modification: 5'-phosphorothioate; note = sugar modification: 2'-O-methoxyethylribose
  modified_base 12: mod_base = OTHER; mod_base = m5c; note = backbone modification: 5'-phosphorothioate; note = sugar modification: 2'-O-methoxyethylribose
  modified_base 13: mod_base = OTHER; note = thymine; note = sugar modification: lna; note = backbone modification: 5'-phosphorothioate
  modified_base 14: mod_base = OTHER; note = backbone modification: 5'-phosphorothioate; note = sugar modification: lna; note = thymine
  modified_base 15: mod_base = m5c; mod_base = OTHER; note = sugar modification: lna; note = backbone modification: 5'-phosphorothioate
  modified_base 16: mod_base = OTHER; note = sugar modification: lna
gtgttcttgtacttca

SEQ ID NO: 1053 - RNA, 16 nt, synthetic construct
  source 1..16: mol_type = other RNA; note = Antisense oligonucleotide
  modified_base 1: mod_base = OTHER; note = backbone modification: 5'-phosphorothioate; note = sugar modification: lna
  modified_base 2: mod_base = OTHER; note = backbone modification: 5'-phosphorothioate; note = sugar modification: lna; note = thymine
  modified_base 3: mod_base = OTHER; note = sugar modification: lna; note = backbone modification: 5'-phosphorothioate
  modified_base 4: mod_base = OTHER; note = backbone modification: 5'-phosphorothioate; note = sugar modification: lna; note = thymine
  modified_base 5: mod_base = OTHER; note = sugar modification: 2'-O-methoxyethylribose; note = backbone modification: 5'-phosphorothioate; note = thymine
  modified_base 6: mod_base = m5c; mod_base = OTHER; note = sugar modification: 2'-O-methoxyethylribose; note = backbone modification: 5'-phosphorothioate
  modified_base 7: mod_base = OTHER; note = backbone modification: 5'-phosphorothioate; note = sugar modification: 2'-O-methoxyethylribose; note = thymine
  modified_base 8: mod_base = OTHER; note = backbone modification: 5'-phosphorothioate; note = thymine; note = sugar modification: 2'-O-methoxyethylribose
  modified_base 9: mod_base = OTHER; note = sugar modification: 2'-O-methoxyethylribose; note = backbone modification: 5'-phosphorothioate
  modified_base 10: mod_base = OTHER; note = thymine; note = backbone modification: 5'-phosphorothioate; note = sugar modification: 2'-O-methoxyethylribose
  modified_base 11: mod_base = OTHER; note = sugar modification: 2'-O-methoxyethylribose; note = backbone modification: 5'-phosphorothioate
  modified_base 12: mod_base = OTHER; mod_base = m5c; note = backbone modification: 5'-phosphorothioate; note = sugar modification: 2'-O-methoxyethylribose
  modified_base 13: mod_base = OTHER; note = backbone modification: 5'-phosphorothioate; note = sugar modification: lna; note = thymine
  modified_base 14: mod_base = OTHER; note = thymine; note = sugar modification: lna; note = backbone modification: 5'-phosphorothioate
  modified_base 15: mod_base = m5c; mod_base = OTHER; note = backbone modification: 5'-phosphorothioate; note = sugar modification: lna
  modified_base 16: mod_base = OTHER; note = sugar modification: lna
gtgttcttgtacttca

SEQ ID NO: 1054 - RNA, 16 nt, synthetic construct
  source 1..16: mol_type = other RNA; note = Antisense oligonucleotide
  modified_base 1: mod_base = OTHER; note = backbone modification: 5'-phosphorothioate; note = sugar modification: lna
  modified_base 2: mod_base = OTHER; note = sugar modification: lna; note = thymine; note = backbone modification: 5'-phosphorothioate
  modified_base 3: mod_base = OTHER; note = backbone modification: 5'-phosphorothioate; note = sugar modification: lna
  modified_base 4: mod_base = OTHER; note = thymine; note = backbone modification: 5'-phosphorothioate; note = sugar modification: lna
  modified_base 5: mod_base = OTHER; note = backbone modification: 5'-phosphorothioate; note = sugar modification: lna; note = thymine
  modified_base 6: mod_base = OTHER; mod_base = m5c; note = backbone modification: 5'-phosphorothioate; note = sugar modification: 2'-O-methoxyethylribose
  modified_base 7: mod_base = OTHER; note = sugar modification: 2'-O-methoxyethylribose; note = backbone modification: 5'-phosphorothioate; note = thymine
  modified_base 8: mod_base = OTHER; note = thymine; note = sugar modification: 2'-O-methoxyethylribose; note = backbone modification: 5'-phosphorothioate
  modified_base 9: mod_base = OTHER; note = backbone modification: 5'-phosphorothioate; note = sugar modification: 2'-O-methoxyethylribose
  modified_base 10: mod_base = OTHER; note = sugar modification: 2'-O-methoxyethylribose; note = backbone modification: 5'-phosphorothioate; note = thymine
  modified_base 11: mod_base = OTHER; note = sugar modification: 2'-O-methoxyethylribose; note = backbone modification: 5'-phosphorothioate
  modified_base 12: mod_base = OTHER; mod_base = m5c; note = sugar modification: lna; note = backbone modification: 5'-phosphorothioate
  modified_base 13: mod_base = OTHER; note = thymine; note = backbone modification: 5'-phosphorothioate; note = sugar modification: lna
  modified_base 14: mod_base = OTHER; note = thymine; note = sugar modification: lna; note = backbone modification: 5'-phosphorothioate
  modified_base 15: mod_base = OTHER; mod_base = m5c; note = backbone modification: 5'-phosphorothioate; note = sugar modification: lna
  modified_base 16: mod_base = OTHER; note = sugar modification: lna
gtgttcttgtacttca

SEQ ID NO: 1055 - RNA, 16 nt, synthetic construct
  source 1..16: mol_type = other RNA; note = Antisense oligonucleotide
  modified_base 1: mod_base = OTHER; note = sugar modification: 2'-O-methoxyethylribose; note = backbone modification: 5'-phosphorothioate
  modified_base 2: mod_base = OTHER; note = backbone modification: 5'-phosphorothioate; note = sugar modification: 2'-O-methoxyethylribose; note = thymine
  modified_base 3: mod_base = OTHER; note = backbone modification: 5'-phosphorothioate; note = sugar modification: 2'-O-methoxyethylribose
  modified_base 4: mod_base = OTHER; note = backbone modification: 5'-phosphorothioate; note = sugar modification: 2'-O-methoxyethylribose; note = thymine
  modified_base 5: mod_base = OTHER; note = backbone modification: 5'-phosphorothioate; note = thymine; note = sugar modification: 2'-O-methoxyethylribose
  modified_base 6: mod_base = OTHER; mod_base = m5c; note = backbone modification: 5'-phosphorothioate; note = sugar modification: 2'-O-methoxyethylribose
  modified_base 7: mod_base = OTHER; note = thymine; note = sugar modification: 2'-O-methoxyethylribose; note = backbone modification: 5'-phosphorothioate
  modified_base 8: mod_base = OTHER; note = thymine; note = backbone modification: 5'-phosphorothioate; note = sugar modification: 2'-O-methoxyethylribose
  modified_base 9: mod_base = OTHER; note = sugar modification: 2'-O-methoxyethylribose; note = backbone modification: 5'-phosphorothioate
  modified_base 10: mod_base = OTHER; note = backbone modification: 5'-phosphorothioate; note = sugar modification: 2'-O-methoxyethylribose; note = thymine
  modified_base 11: mod_base = OTHER; note = backbone modification: 5'-phosphorothioate; note = sugar modification: 2'-O-methoxyethylribose
  modified_base 12: mod_base = OTHER; mod_base = m5c; note = sugar modification: 2'-O-methoxyethylribose; note = backbone modification: 5'-phosphorothioate
  modified_base 13: mod_base = OTHER; note = sugar modification: 2'-O-methoxyethylribose; note = thymine; note = backbone modification: 5'-phosphorothioate
  modified_base 14: mod_base = OTHER; note = sugar modification: 2'-O-methoxyethylribose; note = thymine; note = backbone modification: 5'-phosphorothioate
  modified_base 15: mod_base = m5c; mod_base = OTHER; note = backbone modification: 5'-phosphorothioate; note = sugar modification: 2'-O-methoxyethylribose
  modified_base 16: mod_base = OTHER; note = sugar modification: lna
gtgttcttgtacttca

SEQ ID NO: 1056 - RNA, 16 nt, synthetic construct
  source 1..16: mol_type = other RNA; note = Antisense oligonucleotide
  modified_base 1: mod_base = OTHER; note = backbone modification: 5'-phosphorothioate; note = sugar modification: 2'-O-methoxyethylribose
  modified_base 2: mod_base = OTHER; note = sugar modification: 2'-O-methoxyethylribose; note = thymine; note = backbone modification: 5'-phosphorothioate
  modified_base 3: mod_base = OTHER; note = sugar modification: 2'-O-methoxyethylribose; note = backbone modification: 5'-phosphorothioate
  modified_base 4: mod_base = OTHER; note = sugar modification: 2'-O-methoxyethylribose; note = backbone modification: 5'-phosphorothioate; note = thymine
  modified_base 5: mod_base = OTHER; note = backbone modification: 5'-phosphorothioate; note = thymine; note = sugar modification: 2'-O-methoxyethylribose
  modified_base 6: mod_base = m5c; mod_base = OTHER; note = backbone modification: 5'-phosphorothioate; note = sugar modification: 2'-O-methoxyethylribose
  modified_base 7: mod_base = OTHER; note = thymine; note = backbone modification: 5'-phosphorothioate; note = sugar modification: 2'-O-methoxyethylribose
  modified_base 8: mod_base = OTHER; note = thymine; note = backbone modification: 5'-phosphorothioate; note = sugar modification: 2'-O-methoxyethylribose
  modified_base 9: mod_base = OTHER; note = sugar modification: 2'-O-methoxyethylribose; note = backbone modification: 5'-phosphorothioate
  modified_base 10: mod_base = OTHER; note = backbone modification: 5'-phosphorothioate; note = thymine; note = sugar modification: 2'-O-methoxyethylribose
  modified_base 11: mod_base = OTHER; note = backbone modification: 5'-phosphorothioate; note = sugar modification: 2'-O-methoxyethylribose
  modified_base 12: mod_base = OTHER; mod_base = m5c; note = sugar modification: 2'-O-methoxyethylribose; note = backbone modification: 5'-phosphorothioate
  modified_base 13: mod_base = OTHER; note = sugar modification: 2'-O-methoxyethylribose; note = thymine; note = backbone modification: 5'-phosphorothioate
  modified_base 14: mod_base = OTHER; note = backbone modification: 5'-phosphorothioate; note = thymine; note = sugar modification: 2'-O-methoxyethylribose
  modified_base 15: mod_base = OTHER; mod_base = m5c; note = backbone modification: 5'-phosphorothioate; note = sugar modification: lna
  modified_base 16: mod_base = OTHER; note = sugar modification: lna
gtgttcttgtacttca

SEQ ID NO: 1057 - RNA, 16 nt, synthetic construct
  source 1..16: mol_type = other RNA; note = Antisense oligonucleotide
  modified_base 1: mod_base = OTHER; note = sugar modification: 2'-O-methoxyethylribose; note = backbone modification: 5'-phosphorothioate
  modified_base 2: mod_base = OTHER; note = backbone modification: 5'-phosphorothioate; note = sugar modification: 2'-O-methoxyethylribose; note = thymine
  modified_base 3: mod_base = OTHER; note = sugar modification: 2'-O-methoxyethylribose; note = backbone modification: 5'-phosphorothioate
  modified_base 4: mod_base = OTHER; note = thymine; note = backbone modification: 5'-phosphorothioate; note = sugar modification: 2'-O-methoxyethylribose
  modified_base 5: mod_base = OTHER; note = backbone modification: 5'-phosphorothioate; note = sugar modification: 2'-O-methoxyethylribose; note = thymine
  modified_base 6: mod_base = OTHER; mod_base = m5c; note = sugar modification: 2'-O-methoxyethylribose; note = backbone modification: 5'-phosphorothioate
  modified_base 7: mod_base = OTHER; note = sugar modification: 2'-O-methoxyethylribose; note = backbone modification: 5'-phosphorothioate; note = thymine
  modified_base 8: mod_base = OTHER; note = thymine; note = sugar modification: 2'-O-methoxyethylribose; note = backbone modification: 5'-phosphorothioate
  modified_base 9: mod_base = OTHER; note = backbone modification: 5'-phosphorothioate; note = sugar modification: 2'-O-methoxyethylribose
  modified_base 10: mod_base = OTHER; note = sugar modification: 2'-O-methoxyethylribose; note = thymine; note = backbone modification: 5'-phosphorothioate
  modified_base 11: mod_base = OTHER; note = sugar modification: 2'-O-methoxyethylribose; note = backbone modification: 5'-phosphorothioate
  modified_base 12: mod_base = OTHER; mod_base = m5c; note = sugar modification: 2'-O-methoxyethylribose; note = backbone modification: 5'-phosphorothioate
  modified_base 13: mod_base = OTHER; note = thymine; note = backbone modification: 5'-phosphorothioate; note = sugar modification: 2'-O-methoxyethylribose
  modified_base 14: mod_base = OTHER; note = thymine; note = sugar modification: lna; note = backbone modification: 5'-phosphorothioate
  modified_base 15: mod_base = m5c; mod_base = OTHER; note = sugar modification: lna; note = backbone modification: 5'-phosphorothioate
  modified_base 16: mod_base = OTHER; note = sugar modification: lna
gtgttcttgtacttca

SEQ ID NO: 1058 - RNA, 16 nt, synthetic construct
  source 1..16: mol_type = other RNA; note = Antisense oligonucleotide
  modified_base 1: mod_base = OTHER; note = sugar modification: lna; note = backbone modification: 5'-phosphorothioate
  modified_base 2: mod_base = OTHER; note = backbone modification: 5'-phosphorothioate; note = sugar modification: lna
  modified_base 3: mod_base = OTHER; note = thymine; note = backbone modification: 5'-phosphorothioate; note = sugar modification: lna
  modified_base 4: mod_base = OTHER; note = sugar modification: 2'-O-methoxyethylribose; note = backbone modification: 5'-phosphorothioate
  modified_base 5: mod_base = OTHER; note = sugar modification: 2'-O-methoxyethylribose; note = thymine; note = backbone modification: 5'-phosphorothioate
  modified_base 6: mod_base = OTHER; note = sugar modification: 2'-O-methoxyethylribose; note = thymine; note = backbone modification: 5'-phosphorothioate
  modified_base 7: mod_base = OTHER; mod_base = m5c; note = backbone modification: 5'-phosphorothioate; note = sugar modification: 2'-O-methoxyethylribose
  modified_base 8: mod_base = OTHER; note = sugar modification: 2'-O-methoxyethylribose; note = thymine; note = backbone modification: 5'-phosphorothioate
  modified_base 9: mod_base = OTHER; note = thymine; note = backbone modification: 5'-phosphorothioate; note = sugar modification: 2'-O-methoxyethylribose
  modified_base 10: mod_base = OTHER; note = backbone modification: 5'-phosphorothioate; note = sugar modification: 2'-O-methoxyethylribose
  modified_base 11: mod_base = OTHER; note = backbone modification: 5'-phosphorothioate; note = thymine; note = sugar modification: 2'-O-methoxyethylribose
  modified_base 12: mod_base = OTHER; note = sugar modification: 2'-O-methoxyethylribose; note = backbone modification: 5'-phosphorothioate
  modified_base 13: mod_base = m5c; mod_base = OTHER; note = sugar modification: 2'-O-methoxyethylribose; note = backbone modification: 5'-phosphorothioate
  modified_base 14: mod_base = OTHER; note = thymine; note = sugar modification: lna; note = backbone modification: 5'-phosphorothioate
  modified_base 15: mod_base = OTHER; note = backbone modification: 5'-phosphorothioate; note = thymine; note = sugar modification: lna
  modified_base 16: mod_base = OTHER; mod_base = m5c; note = sugar modification: lna
ggtgttcttgtacttc

SEQ ID NO: 1059 - RNA, 16 nt, synthetic construct
  source 1..16: mol_type = other RNA; note = Antisense oligonucleotide
  modified_base 1: mod_base = OTHER; note = backbone modification: 5'-phosphorothioate; note = sugar modification: lna
  modified_base 2: mod_base = OTHER; note = backbone modification: 5'-phosphorothioate; note = sugar modification: 2'-O-methoxyethylribose
  modified_base 3: mod_base = OTHER; note = backbone modification: 5'-phosphorothioate; note = thymine; note = sugar modification: 2'-O-methoxyethylribose
  modified_base 4: mod_base = OTHER; note = backbone modification: 5'-phosphorothioate; note = sugar modification: 2'-O-methoxyethylribose
  modified_base 5: mod_base = OTHER; note = thymine; note = backbone modification: 5'-phosphorothioate; note = sugar modification: 2'-O-methoxyethylribose
  modified_base 6: mod_base = OTHER; note = backbone modification: 5'-phosphorothioate; note = sugar modification: 2'-O-methoxyethylribose; note = thymine
  modified_base 7: mod_base = OTHER; mod_base = m5c; note = backbone modification: 5'-phosphorothioate; note = sugar modification: 2'-O-methoxyethylribose
  modified_base 8: mod_base = OTHER; note = thymine; note = sugar modification: 2'-O-methoxyethylribose; note = backbone modification: 5'-phosphorothioate
  modified_base 9: mod_base = OTHER; note = thymine; note = backbone modification: 5'-phosphorothioate; note = sugar modification: 2'-O-methoxyethylribose
  modified_base 10: mod_base = OTHER; note = backbone modification: 5'-phosphorothioate; note = sugar modification: 2'-O-methoxyethylribose
  modified_base 11: mod_base = OTHER; note = sugar modification: 2'-O-methoxyethylribose; note = backbone modification: 5'-phosphorothioate; note = thymine
  modified_base 12: mod_base = OTHER; note = backbone modification: 5'-phosphorothioate; note = sugar modification: 2'-O-methoxyethylribose
  modified_base 13: mod_base = OTHER; mod_base = m5c; note = backbone modification: 5'-phosphorothioate; note = sugar modification: 2'-O-methoxyethylribose
  modified_base 14: mod_base = OTHER; note = sugar modification: 2'-O-methoxyethylribose; note = thymine; note = backbone modification: 5'-phosphorothioate
  modified_base 15: mod_base = OTHER; note = sugar modification: 2'-O-methoxyethylribose; note = backbone modification: 5'-phosphorothioate; note = thymine
  modified_base 16: mod_base = OTHER; mod_base = m5c; note = sugar modification: 2'-O-methoxyethylribose
ggtgttcttgtacttc

SEQ ID NO: 1060 - RNA, 16 nt, synthetic construct
  source 1..16: mol_type = other RNA; note = Antisense oligonucleotide
  modified_base 1: mod_base = OTHER; note = sugar modification: lna; note = backbone modification: 5'-phosphorothioate
  modified_base 2: mod_base = OTHER; note = sugar modification: lna; note = backbone modification: 5'-phosphorothioate
  modified_base 3: mod_base = OTHER; note = backbone modification: 5'-phosphorothioate; note = sugar modification: 2'-O-methoxyethylribose; note = thymine
  modified_base 4: mod_base = OTHER; note = sugar modification: 2'-O-methoxyethylribose; note = backbone modification: 5'-phosphorothioate
  modified_base 5: mod_base = OTHER; note = backbone modification: 5'-phosphorothioate; note = sugar modification: 2'-O-methoxyethylribose; note = thymine
  modified_base 6: mod_base = OTHER; note = thymine; note = backbone modification: 5'-phosphorothioate; note = sugar modification: 2'-O-methoxyethylribose
  modified_base 7: mod_base = OTHER; mod_base = m5c; note = sugar modification: 2'-O-methoxyethylribose; note = backbone modification: 5'-phosphorothioate
  modified_base 8: mod_base = OTHER; note = sugar modification: 2'-O-methoxyethylribose; note = backbone modification: 5'-phosphorothioate; note = thymine
  modified_base 9: mod_base = OTHER; note = sugar modification: 2'-O-methoxyethylribose; note = backbone modification: 5'-phosphorothioate; note = thymine
  modified_base 10: mod_base = OTHER; note = sugar modification: 2'-O-methoxyethylribose; note = backbone modification: 5'-phosphorothioate
  modified_base 11: mod_base = OTHER; note = backbone modification: 5'-phosphorothioate; note = thymine; note = sugar modification: 2'-O-methoxyethylribose
  modified_base 12: mod_base = OTHER; note = sugar modification: 2'-O-methoxyethylribose; note = backbone modification: 5'-phosphorothioate
  modified_base 13: mod_base = m5c; mod_base = OTHER; note = sugar modification: 2'-O-methoxyethylribose; note = backbone modification: 5'-phosphorothioate
  modified_base 14: mod_base = OTHER; note = backbone modification: 5'-phosphorothioate; note = sugar modification: 2'-O-methoxyethylribose; note = thymine
  modified_base 15: mod_base = OTHER; note = sugar modification: 2'-O-methoxyethylribose; note = thymine; note = backbone modification: 5'-phosphorothioate
  modified_base 16: mod_base = OTHER; mod_base = m5c; note = sugar modification: 2'-O-methoxyethylribose
ggtgttcttgtacttc

SEQ ID NO: 1061 - RNA, 16 nt, synthetic construct
  source 1..16: mol_type = other RNA; note = Antisense oligonucleotide
  modified_base 1: mod_base = OTHER; note = backbone modification: 5'-phosphorothioate; note = sugar modification: lna
  modified_base 2: mod_base = OTHER; note = sugar modification: lna; note = backbone modification: 5'-phosphorothioate
  modified_base 3: mod_base = OTHER; note = sugar modification: lna; note = backbone modification: 5'-phosphorothioate; note = thymine
  modified_base 4: mod_base = OTHER; note = sugar modification: 2'-O-methoxyethylribose; note = backbone modification: 5'-phosphorothioate
  modified_base 5: mod_base = OTHER; note = backbone modification: 5'-phosphorothioate; note = sugar modification: 2'-O-methoxyethylribose; note = thymine
  modified_base 6: mod_base = OTHER; note = thymine; note = sugar modification: 2'-O-methoxyethylribose; note = backbone modification: 5'-phosphorothioate
  modified_base 7: mod_base = OTHER; mod_base = m5c; note = backbone modification: 5'-phosphorothioate; note = sugar modification: 2'-O-methoxyethylribose
  modified_base 8: mod_base = OTHER; note = thymine; note = backbone modification: 5'-phosphorothioate; note = sugar modification: 2'-O-methoxyethylribose
  modified_base 9: mod_base = OTHER; note = sugar modification: 2'-O-methoxyethylribose; note = thymine; note = backbone modification: 5'-phosphorothioate
  modified_base 10: mod_base = OTHER; note = sugar modification: 2'-O-methoxyethylribose; note = backbone modification: 5'-phosphorothioate
  modified_base 11: mod_base = OTHER; note = backbone modification: 5'-phosphorothioate; note = thymine; note = sugar modification: 2'-O-methoxyethylribose
  modified_base 12: mod_base = OTHER; note = sugar modification: 2'-O-methoxyethylribose; note = backbone modification: 5'-phosphorothioate
  modified_base 13: mod_base = m5c; mod_base = OTHER; note = sugar modification: 2'-O-methoxyethylribose; note = backbone modification: 5'-phosphorothioate
  modified_base 14: mod_base = OTHER; note = backbone modification: 5'-phosphorothioate; note = sugar modification: 2'-O-methoxyethylribose; note = thymine
  modified_base 15: mod_base = OTHER; note = backbone modification: 5'-phosphorothioate; note = thymine; note = sugar modification: 2'-O-methoxyethylribose
  modified_base 16: mod_base = OTHER; mod_base = m5c; note = sugar modification: 2'-O-methoxyethylribose
ggtgttcttgtacttc

SEQ ID NO: 1062 - RNA, 16 nt, synthetic construct
  source 1..16: mol_type = other RNA; note = Antisense oligonucleotide
  modified_base 1: mod_base = OTHER; note = sugar modification: lna; note = backbone modification: 5'-phosphorothioate
  modified_base 2: mod_base = OTHER; note = sugar modification: 2'-O-methoxyethylribose; note = backbone modification: 5'-phosphorothioate
  modified_base 3: mod_base = OTHER; note = thymine; note = backbone modification: 5'-phosphorothioate; note = sugar modification: 2'-O-methoxyethylribose
  modified_base 4: mod_base = OTHER; note = backbone modification: 5'-phosphorothioate; note = sugar modification: 2'-O-methoxyethylribose
  modified_base 5: mod_base = OTHER; note = backbone modification: 5'-phosphorothioate; note = thymine; note = sugar modification: 2'-O-methoxyethylribose
  modified_base 6: mod_base = OTHER; note = sugar modification: 2'-O-methoxyethylribose; note = thymine; note = backbone modification: 5'-phosphorothioate
  modified_base 7: mod_base = m5c; mod_base = OTHER; note = sugar modification: 2'-O-methoxyethylribose; note = backbone modification: 5'-phosphorothioate
  modified_base 8: mod_base = OTHER; note = backbone modification: 5'-phosphorothioate; note = thymine; note = sugar modification: 2'-O-methoxyethylribose
  modified_base 9: mod_base = OTHER; note = thymine; note = backbone modification: 5'-phosphorothioate; note = sugar modification: 2'-O-methoxyethylribose
  modified_base 10: mod_base = OTHER; note = sugar modification: 2'-O-methoxyethylribose; note = backbone modification: 5'-phosphorothioate
  modified_base 11: mod_base = OTHER; note = sugar modification: 2'-O-methoxyethylribose; note = thymine; note = backbone modification: 5'-phosphorothioate
  modified_base 12: mod_base = OTHER; note = backbone modification: 5'-phosphorothioate; note = sugar modification: 2'-O-methoxyethylribose
  modified_base 13: mod_base = OTHER; mod_base = m5c; note = backbone modification: 5'-phosphorothioate; note = sugar modification: 2'-O-methoxyethylribose
  modified_base 14: mod_base = OTHER; note = sugar modification: 2'-O-methoxyethylribose; note = thymine; note = backbone modification: 5'-phosphorothioate
  modified_base 15: mod_base = OTHER; note = backbone modification: 5'-phosphorothioate; note = thymine; note = sugar modification: 2'-O-methoxyethylribose
  modified_base 16: mod_base = m5c; mod_base = OTHER; note = sugar modification: lna
ggtgttcttgtacttc

SEQ ID NO: 1063 - RNA, 16 nt, synthetic construct
  source 1..16: mol_type = other RNA; note = Antisense oligonucleotide
  modified_base 1: mod_base = OTHER; note = backbone modification: 5'-phosphorothioate; note = sugar modification: lna
  modified_base 2: mod_base = OTHER; note = sugar modification: lna; note = backbone modification: 5'-phosphorothioate
  modified_base 3: mod_base = OTHER; note = backbone modification: 5'-phosphorothioate; note = sugar modification: 2'-O-methoxyethylribose; note = thymine
  modified_base 4: mod_base = OTHER; note = sugar modification: 2'-O-methoxyethylribose; note = backbone modification: 5'-phosphorothioate
  modified_base 5: mod_base = OTHER; note = backbone modification: 5'-phosphorothioate; note = thymine; note = sugar modification: 2'-O-methoxyethylribose
  modified_base 6: mod_base = OTHER; note = backbone modification: 5'-phosphorothioate; note = thymine; note = sugar modification: 2'-O-methoxyethylribose
  modified_base 7: mod_base = m5c; mod_base = OTHER; note = backbone modification: 5'-phosphorothioate; note = sugar modification: 2'-O-methoxyethylribose
  modified_base 8: mod_base = OTHER; note = sugar modification: 2'-O-methoxyethylribose; note = backbone modification: 5'-phosphorothioate; note = thymine
  modified_base 9: mod_base = OTHER; note = backbone modification: 5'-phosphorothioate; note = sugar modification: 2'-O-methoxyethylribose; note = thymine
  modified_base 10: mod_base = OTHER; note = sugar modification: 2'-O-methoxyethylribose; note = backbone modification: 5'-phosphorothioate
  modified_base 11: mod_base = OTHER; note = thymine; note = backbone modification: 5'-phosphorothioate; note = sugar modification: 2'-O-methoxyethylribose
  modified_base 12: mod_base = OTHER; note = backbone modification: 5'-phosphorothioate; note = sugar modification: 2'-O-methoxyethylribose
  modified_base 13: mod_base = OTHER; mod_base = m5c; note = sugar modification: 2'-O-methoxyethylribose; note = backbone modification: 5'-phosphorothioate
  modified_base 14: mod_base = OTHER; note = sugar modification: 2'-O-methoxyethylribose; note = thymine; note = backbone modification: 5'-phosphorothioate
  modified_base 15: mod_base = OTHER; note = sugar modification: 2'-O-methoxyethylribose; note = thymine; note = backbone modification: 5'-phosphorothioate
  modified_base 16: mod_base = OTHER; mod_base = m5c; note = sugar modification: lna
ggtgttcttgtacttc

SEQ ID NO: 1064 - RNA, 16 nt, synthetic construct
  source 1..16: mol_type = other RNA; note = Antisense oligonucleotide
  modified_base 1: mod_base = OTHER; note = backbone modification: 5'-phosphorothioate; note = sugar modification: lna
  modified_base 2: mod_base = OTHER; note = backbone modification: 5'-phosphorothioate; note = sugar modification: lna
  modified_base 3: mod_base = OTHER; note = backbone modification: 5'-phosphorothioate; note = thymine; note = sugar modification: lna
  modified_base 4: mod_base = OTHER; note = backbone modification: 5'-phosphorothioate; note = sugar modification: 2'-O-methoxyethylribose
  modified_base 5: mod_base = OTHER; note = backbone modification: 5'-phosphorothioate; note = thymine; note = sugar modification: 2'-O-methoxyethylribose
  modified_base 6: mod_base = OTHER; note = thymine; note = sugar modification: 2'-O-methoxyethylribose; note = backbone modification: 5'-phosphorothioate
  modified_base 7: mod_base = OTHER; mod_base = m5c; note = backbone modification: 5'-phosphorothioate; note = sugar modification: 2'-O-methoxyethylribose
  modified_base 8: mod_base = OTHER; note = thymine; note = backbone modification: 5'-phosphorothioate; note = sugar modification: 2'-O-methoxyethylribose
  modified_base 9: mod_base = OTHER; note = sugar modification: 2'-O-methoxyethylribose; note = backbone modification: 5'-phosphorothioate; note = thymine
  modified_base 10: mod_base = OTHER; note = backbone modification: 5'-phosphorothioate; note = sugar modification: 2'-O-methoxyethylribose
  modified_base 11: mod_base = OTHER; note = sugar modification: 2'-O-methoxyethylribose; note = thymine; note = backbone modification: 5'-phosphorothioate
  modified_base 12: mod_base = OTHER; note = sugar modification: 2'-O-methoxyethylribose; note = backbone modification: 5'-phosphorothioate
  modified_base 13: mod_base = OTHER; mod_base = m5c; note = sugar modification: 2'-O-methoxyethylribose; note = backbone modification: 5'-phosphorothioate
  modified_base 14: mod_base = OTHER; note = backbone modification: 5'-phosphorothioate; note = sugar modification: 2'-O-methoxyethylribose; note = thymine
  modified_base 15: mod_base = OTHER; note = thymine; note = backbone modification: 5'-phosphorothioate; note = sugar modification: 2'-O-methoxyethylribose
  modified_base 16: mod_base = m5c; mod_base = OTHER; note = sugar modification: lna
ggtgttcttgtacttc

SEQ ID NO: 1065 - RNA, 16 nt, synthetic construct
  source 1..16: mol_type = other RNA; note = Antisense oligonucleotide
  modified_base 1: mod_base = OTHER; note = sugar modification: lna; note = backbone modification: 5'-phosphorothioate
  modified_base 2: mod_base = OTHER; note = sugar modification: 2'-O-methoxyethylribose; note = backbone modification: 5'-phosphorothioate
  modified_base 3: mod_base = OTHER; note = backbone modification: 5'-phosphorothioate; note = sugar modification: 2'-O-methoxyethylribose; note = thymine
  modified_base 4: mod_base = OTHER; note = backbone modification: 5'-phosphorothioate; note = sugar modification: 2'-O-methoxyethylribose
  modified_base 5: mod_base = OTHER; note = backbone modification: 5'-phosphorothioate; note = sugar modification: 2'-O-methoxyethylribose; note = thymine
  modified_base 6: mod_base = OTHER; note = sugar modification: 2'-O-methoxyethylribose; note = backbone modification: 5'-phosphorothioate; note = thymine
  modified_base 7: mod_base = m5c; mod_base = OTHER; note = sugar modification: 2'-O-methoxyethylribose; note = backbone modification: 5'-phosphorothioate
  modified_base 8: mod_base = OTHER; note = backbone modification: 5'-phosphorothioate; note = thymine; note = sugar modification: 2'-O-methoxyethylribose
  modified_base 9: mod_base = OTHER; note = thymine; note = sugar modification: 2'-O-methoxyethylribose; note = backbone modification: 5'-phosphorothioate
  modified_base 10: mod_base = OTHER; note = backbone modification: 5'-phosphorothioate; note = sugar modification: 2'-O-methoxyethylribose
  modified_base 11: mod_base = OTHER; note = thymine; note = backbone modification: 5'-phosphorothioate; note = sugar modification: 2'-O-methoxyethylribose
  modified_base 12: mod_base = OTHER; note = sugar modification: 2'-O-methoxyethylribose; note = backbone modification: 5'-phosphorothioate
  modified_base 13: mod_base = m5c; mod_base = OTHER; note = backbone modification: 5'-phosphorothioate; note = sugar modification: 2'-O-methoxyethylribose
  modified_base 14: mod_base = OTHER; note = thymine; note = backbone modification: 5'-phosphorothioate; note = sugar modification: 2'-O-methoxyethylribose
  modified_base 15: mod_base = OTHER; note = sugar modification: lna; note = thymine; note = backbone modification: 5'-phosphorothioate
  modified_base 16: mod_base = OTHER; mod_base = m5c; note = sugar modification: lna
ggtgttcttgtacttc

SEQ ID NO: 1066 - RNA, 16 nt, synthetic construct
  source 1..16: mol_type = other RNA; note = Antisense oligonucleotide
  modified_base 1: mod_base = OTHER; note = sugar modification: lna; note = backbone modification: 5'-phosphorothioate
  modified_base 2: mod_base = OTHER; note = backbone modification: 5'-phosphorothioate; note = sugar modification: lna
  modified_base 3: mod_base = OTHER; note = sugar modification: lna; note = thymine; note = backbone modification: 5'-phosphorothioate
  modified_base 4: mod_base = OTHER; note = backbone modification: 5'-phosphorothioate; note = sugar modification: 2'-O-methoxyethylribose
  modified_base 5: mod_base = OTHER; note = backbone modification: 5'-phosphorothioate; note = thymine; note = sugar modification: 2'-O-methoxyethylribose
  modified_base 6: mod_base = OTHER; note = thymine; note = sugar modification: 2'-O-methoxyethylribose; note = backbone modification: 5'-phosphorothioate
  modified_base 7: mod_base = m5c; mod_base = OTHER; note = sugar modification: 2'-O-methoxyethylribose; note = backbone modification: 5'-phosphorothioate
  modified_base 8: mod_base = OTHER; note = backbone modification: 5'-phosphorothioate; note = thymine; note = sugar modification: 2'-O-methoxyethylribose
  modified_base 9: mod_base = OTHER; note = thymine; note = sugar modification: 2'-O-methoxyethylribose; note = backbone modification: 5'-phosphorothioate
  modified_base 10: mod_base = OTHER; note = sugar modification: 2'-O-methoxyethylribose; note = backbone modification: 5'-phosphorothioate
  modified_base 11: mod_base = OTHER; note = sugar modification: 2'-O-methoxyethylribose; note = backbone modification: 5'-phosphorothioate; note = thymine
  modified_base 12: mod_base = OTHER; note = backbone modification: 5'-phosphorothioate; note = sugar modification: 2'-O-methoxyethylribose
  modified_base 13: mod_base = OTHER; mod_base = m5c; note = backbone modification: 5'-phosphorothioate; note = sugar modification: 2'-O-methoxyethylribose
  modified_base 14: mod_base = OTHER; note = thymine; note = sugar modification: 2'-O-methoxyethylribose; note = backbone modification: 5'-phosphorothioate
  modified_base 15: mod_base = OTHER; note = thymine; note = backbone modification: 5'-phosphorothioate; note = sugar modification: lna
  modified_base 16: mod_base = OTHER; mod_base = m5c; note = sugar modification: lna
ggtgttcttgtacttc

SEQ ID NO: 1067 - RNA, 16 nt, synthetic construct
  source 1..16: mol_type = other RNA; note = Antisense oligonucleotide
  modified_base 1: mod_base = OTHER; note = backbone modification: 5'-phosphorothioate; note = sugar modification: lna
  modified_base 2: mod_base = OTHER; note = backbone modification: 5'-phosphorothioate; note = sugar modification: lna
  modified_base 3: mod_base = OTHER; note = thymine; note = backbone modification: 5'-phosphorothioate; note = sugar modification: lna
  modified_base 4: mod_base = OTHER; note = backbone modification: 5'-phosphorothioate; note = sugar modification: lna
  modified_base 5: mod_base = OTHER; note = backbone modification: 5'-phosphorothioate; note = sugar modification: 2'-O-methoxyethylribose; note = thymine
  modified_base 6: mod_base = OTHER; note = backbone modification: 5'-phosphorothioate; note = sugar modification: 2'-O-methoxyethylribose; note = thymine
  modified_base 7: mod_base = m5c; mod_base = OTHER; note = sugar modification: 2'-O-methoxyethylribose; note = backbone modification: 5'-phosphorothioate
  modified_base 8: mod_base = OTHER; note = thymine; note = sugar modification: 2'-O-methoxyethylribose; note = backbone modification: 5'-phosphorothioate
  modified_base 9: mod_base = OTHER; note = backbone modification: 5'-phosphorothioate; note = sugar modification: 2'-O-methoxyethylribose; note = thymine
  modified_base 10: mod_base = OTHER; note = backbone modification: 5'-phosphorothioate; note = sugar modification: 2'-O-methoxyethylribose
  modified_base 11: mod_base = OTHER; note = sugar modification: 2'-O-methoxyethylribose; note = backbone modification: 5'-phosphorothioate; note = thymine
  modified_base 12: mod_base = OTHER; note = sugar modification: 2'-O-methoxyethylribose; note = backbone modification: 5'-phosphorothioate
  modified_base 13: mod_base = m5c; mod_base = OTHER; note = sugar modification: 2'-O-methoxyethylribose; note = backbone modification: 5'-phosphorothioate
  modified_base 14: mod_base = OTHER; note = backbone modification: 5'-phosphorothioate; note = sugar modification: 2'-O-methoxyethylribose; note = thymine
  modified_base 15: mod_base = OTHER; note = backbone modification: 5'-phosphorothioate; note = sugar modification: lna; note = thymine
  modified_base 16: mod_base = OTHER; mod_base = m5c; note = sugar modification: lna
ggtgttcttgtacttc

SEQ ID NO: 1068 - RNA, 16 nt, synthetic construct
  source 1..16: mol_type = other RNA; note = Antisense oligonucleotide
  modified_base 1: mod_base = OTHER; note = sugar modification: lna; note = backbone modification: 5'-phosphorothioate
  modified_base 2: mod_base = OTHER; note = sugar modification: 2'-O-methoxyethylribose; note = backbone modification: 5'-phosphorothioate
  modified_base 3: mod_base = OTHER; note = backbone modification: 5'-phosphorothioate; note = thymine; note = sugar modification: 2'-O-methoxyethylribose
  modified_base 4: mod_base = OTHER; note = sugar modification: 2'-O-methoxyethylribose; note = backbone modification: 5'-phosphorothioate
  modified_base 5: mod_base = OTHER; note = backbone modification: 5'-phosphorothioate; note = sugar modification: 2'-O-methoxyethylribose; note = thymine
  modified_base 6: mod_base = OTHER; note = thymine; note = sugar modification: 2'-O-methoxyethylribose; note = backbone modification: 5'-phosphorothioate
  modified_base 7: mod_base = OTHER; mod_base = m5c; note = backbone modification: 5'-phosphorothioate; note = sugar modification: 2'-O-methoxyethylribose
  modified_base 8: mod_base = OTHER; note = thymine; note = sugar modification: 2'-O-methoxyethylribose; note = backbone modification: 5'-phosphorothioate
  modified_base 9: mod_base = OTHER; note = backbone modification: 5'-phosphorothioate; note = sugar modification: 2'-O-methoxyethylribose; note = thymine
  modified_base 10: mod_base = OTHER; note = sugar modification: 2'-O-methoxyethylribose; note = backbone modification: 5'-phosphorothioate
  modified_base 11: mod_base = OTHER; note = sugar modification: 2'-O-methoxyethylribose; note = backbone modification: 5'-phosphorothioate; note = thymine
  modified_base 12: mod_base = OTHER; note = sugar modification: 2'-O-methoxyethylribose; note = backbone modification: 5'-phosphorothioate
  modified_base 13: mod_base = OTHER; mod_base = m5c; note = backbone modification: 5'-phosphorothioate; note = sugar modification: 2'-O-methoxyethylribose
  modified_base 14: mod_base = OTHER; note = thymine; note = backbone modification: 5'-phosphorothioate; note = sugar modification: lna
  modified_base 15: mod_base = OTHER; note = backbone modification: 5'-phosphorothioate; note = thymine; note = sugar modification: lna
  modified_base 16: mod_base = OTHER; mod_base = m5c; note = sugar modification: lna
ggtgttcttgtacttc

SEQ ID NO: 1069 - RNA, 16 nt, synthetic construct
  source 1..16: mol_type = other RNA; note = Antisense oligonucleotide
  modified_base 1: mod_base = OTHER; note = sugar modification: lna; note = backbone modification: 5'-phosphorothioate
  modified_base 2: mod_base = OTHER; note = sugar modification: lna; note = backbone modification: 5'-phosphorothioate
  modified_base 3: mod_base = OTHER; note = thymine; note = backbone modification: 5'-phosphorothioate; note = sugar modification: 2'-O-methoxyethylribose
  modified_base 4: mod_base = OTHER; note = backbone modification: 5'-phosphorothioate; note = sugar modification: 2'-O-methoxyethylribose
  modified_base 5: mod_base = OTHER; note = thymine; note = backbone modification: 5'-phosphorothioate; note = sugar modification: 2'-O-methoxyethylribose
  modified_base 6: mod_base = OTHER; note = thymine; note = backbone modification: 5'-phosphorothioate; note = sugar modification: 2'-O-methoxyethylribose
  modified_base 7: mod_base = m5c; mod_base = OTHER; note = sugar modification: 2'-O-methoxyethylribose; note = backbone modification: 5'-phosphorothioate
  modified_base 8: mod_base = OTHER; note = backbone modification: 5'-phosphorothioate; note = sugar modification: 2'-O-methoxyethylribose; note = thymine
  modified_base 9: mod_base = OTHER; note = sugar modification: 2'-O-methoxyethylribose; note = backbone modification: 5'-phosphorothioate; note = thymine
  modified_base 10: mod_base = OTHER; note = backbone modification: 5'-phosphorothioate; note = sugar modification: 2'-O-methoxyethylribose
  modified_base 11: mod_base = OTHER; note = backbone modification: 5'-phosphorothioate; note = thymine; note = sugar modification: 2'-O-methoxyethylribose
  modified_base 12: mod_base = OTHER; note = backbone modification: 5'-phosphorothioate; note = sugar modification: 2'-O-methoxyethylribose
  modified_base 13: mod_base = OTHER; mod_base = m5c; note = backbone modification: 5'-phosphorothioate; note = sugar modification: 2'-O-methoxyethylribose
  modified_base 14: mod_base = OTHER; note = thymine; note = backbone modification: 5'-phosphorothioate; note = sugar modification: lna
  modified_base 15: mod_base = OTHER; note = backbone modification: 5'-phosphorothioate; note = sugar modification: lna; note = thymine
  modified_base 16: mod_base = OTHER; mod_base = m5c; note = sugar modification: lna
ggtgttcttgtacttc

SEQ ID NO: 1070 - RNA, 16 nt, synthetic construct
  source 1..16: mol_type = other RNA; note = Antisense oligonucleotide
  modified_base 1: mod_base = OTHER; note = backbone modification: 5'-phosphorothioate; note = sugar modification: lna
  modified_base 2: mod_base = OTHER; note = sugar modification: lna; note = backbone modification: 5'-phosphorothioate
  modified_base 3: mod_base = OTHER; note = sugar modification: lna; note = thymine; note = backbone modification: 5'-phosphorothioate
  modified_base 4: mod_base = OTHER; note = backbone modification: 5'-phosphorothioate; note = sugar modification: lna
  modified_base 5: mod_base = OTHER; note = backbone modification: 5'-phosphorothioate; note = sugar modification: 2'-O-methoxyethylribose; note = thymine
  modified_base 6: mod_base = OTHER; note = backbone modification: 5'-phosphorothioate; note = thymine; note = sugar modification: 2'-O-methoxyethylribose
  modified_base 7: mod_base = OTHER; mod_base = m5c; note = sugar modification: 2'-O-methoxyethylribose; note = backbone modification: 5'-phosphorothioate
  modified_base 8: mod_base = OTHER; note = thymine; note = sugar modification: 2'-O-methoxyethylribose; note = backbone modification: 5'-phosphorothioate
  modified_base 9: mod_base = OTHER; note = thymine; note = sugar modification: 2'-O-methoxyethylribose; note = backbone modification: 5'-phosphorothioate
  modified_base 10: mod_base = OTHER; note = backbone modification: 5'-phosphorothioate; note = sugar modification: 2'-O-methoxyethylribose
  modified_base 11: mod_base = OTHER; note = backbone modification: 5'-phosphorothioate; note = sugar modification: 2'-O-methoxyethylribose; note = thymine
  modified_base 12: mod_base = OTHER; note = sugar modification: 2'-O-methoxyethylribose; note = backbone modification: 5'-phosphorothioate
  modified_base 13: mod_base = OTHER; mod_base = m5c; note = backbone modification: 5'-phosphorothioate; note = sugar modification: 2'-O-methoxyethylribose
  modified_base 14: mod_base = OTHER; note = backbone modification: 5'-phosphorothioate; note = thymine; note = sugar modification: lna
  modified_base 15: mod_base = OTHER; note = backbone modification: 5'-phosphorothioate; note = sugar modification: lna; note = thymine
  modified_base 16: mod_base = m5c; mod_base = OTHER; note = sugar modification: lna
ggtgttcttgtacttc

SEQ ID NO: 1071 - RNA, 16 nt, synthetic construct
  source 1..16: mol_type = other RNA; note = Antisense oligonucleotide
  modified_base 1: mod_base = OTHER; note = sugar modification: lna; note = backbone modification: 5'-phosphorothioate
  modified_base 2: mod_base = OTHER; note = backbone modification: 5'-phosphorothioate; note = sugar modification: lna
  modified_base 3: mod_base = OTHER; note = backbone modification: 5'-phosphorothioate; note = thymine; note = sugar modification: 2'-O-methoxyethylribose
  modified_base 4: mod_base = OTHER; note = sugar modification: 2'-O-methoxyethylribose; note = backbone modification: 5'-phosphorothioate
  modified_base 5: mod_base = OTHER; note = sugar modification: 2'-O-methoxyethylribose; note = backbone modification: 5'-phosphorothioate; note = thymine
  modified_base 6: mod_base = OTHER; note = backbone modification: 5'-phosphorothioate; note = sugar modification: 2'-O-methoxyethylribose; note = thymine
  modified_base 7: mod_base = OTHER; mod_base = m5c; note = sugar modification: 2'-O-methoxyethylribose; note = backbone modification: 5'-phosphorothioate
  modified_base 8: mod_base = OTHER; note = sugar modification: 2'-O-methoxyethylribose; note = thymine; note = backbone modification: 5'-phosphorothioate
  modified_base 9: mod_base = OTHER; note = sugar modification: 2'-O-methoxyethylribose; note = thymine; note = backbone modification: 5'-phosphorothioate
  modified_base 10: mod_base = OTHER; note = sugar modification: 2'-O-methoxyethylribose; note = backbone modification: 5'-phosphorothioate
  modified_base 11: mod_base = OTHER; note = backbone modification: 5'-phosphorothioate; note = sugar modification: 2'-O-methoxyethylribose; note = thymine
  modified_base 12: mod_base = OTHER; note = backbone modification: 5'-phosphorothioate; note = sugar modification: 2'-O-methoxyethylribose
  modified_base 13: mod_base = m5c; mod_base = OTHER; note = sugar modification: lna; note = backbone modification: 5'-phosphorothioate
  modified_base 14: mod_base = OTHER; note = backbone modification: 5'-phosphorothioate; note = sugar modification: lna; note = thymine
  modified_base 15: mod_base = OTHER; note = backbone modification: 5'-phosphorothioate; note = sugar modification: lna; note = thymine
  modified_base 16: mod_base = OTHER; mod_base = m5c; note = sugar modification: lna
ggtgttcttgtacttc

SEQ ID NO: 1072 - RNA, 16 nt, synthetic construct
  source 1..16: mol_type = other RNA; note = Antisense oligonucleotide
  modified_base 1: mod_base = OTHER; note = sugar modification: lna; note = backbone modification: 5'-phosphorothioate
  modified_base 2: mod_base = OTHER; note = backbone modification: 5'-phosphorothioate; note = sugar modification: lna
  modified_base 3: mod_base = OTHER; note = backbone modification: 5'-phosphorothioate; note = thymine; note = sugar modification: lna
  modified_base 4: mod_base = OTHER; note = backbone modification: 5'-phosphorothioate; note = sugar modification: 2'-O-methoxyethylribose
  modified_base 5: mod_base = OTHER; note = backbone modification: 5'-phosphorothioate; note = sugar modification: 2'-O-methoxyethylribose; note = thymine
  modified_base 6: mod_base = OTHER; note = sugar modification: 2'-O-methoxyethylribose; note = thymine; note = backbone modification: 5'-phosphorothioate
  modified_base 7: mod_base = OTHER; mod_base = m5c; note = backbone modification: 5'-phosphorothioate; note = sugar modification: 2'-O-methoxyethylribose
  modified_base 8: mod_base = OTHER; note = backbone modification: 5'-phosphorothioate; note = thymine; note = sugar modification: 2'-O-methoxyethylribose
  modified_base 9: mod_base = OTHER; note = backbone modification: 5'-phosphorothioate; note = sugar modification: 2'-O-methoxyethylribose; note = thymine
  modified_base 10: mod_base = OTHER; note = sugar modification: 2'-O-methoxyethylribose; note = backbone modification: 5'-phosphorothioate
  modified_base 11: mod_base = OTHER; note = thymine; note = backbone modification: 5'-phosphorothioate; note = sugar modification: 2'-O-methoxyethylribose
  modified_base 12: mod_base = OTHER; note = sugar modification: 2'-O-methoxyethylribose; note = backbone modification: 5'-phosphorothioate
  modified_base 13: mod_base = m5c; mod_base = OTHER; note = backbone modification: 5'-phosphorothioate; note = sugar modification: lna
  modified_base 14: mod_base = OTHER; note = sugar modification: lna; note = thymine; note = backbone modification: 5'-phosphorothioate
  modified_base 15: mod_base = OTHER; note = sugar modification: lna; note = backbone modification: 5'-phosphorothioate; note = thymine
  modified_base 16: mod_base = OTHER; mod_base = m5c; note = sugar modification: lna
ggtgttcttgtacttc

SEQ ID NO: 1073 - RNA, 16 nt, synthetic construct
  source 1..16: mol_type = other RNA; note = Antisense oligonucleotide
  modified_base 1: mod_base = OTHER; note = backbone modification: 5'-phosphorothioate; note = sugar modification: lna
  modified_base 2: mod_base = OTHER; note = sugar modification: lna; note = backbone modification: 5'-phosphorothioate
  modified_base 3: mod_base = OTHER; note = sugar modification: lna; note = thymine; note = backbone modification: 5'-phosphorothioate
  modified_base 4: mod_base = OTHER; note = backbone modification: 5'-phosphorothioate; note = sugar modification: lna
  modified_base 5: mod_base = OTHER; note = thymine; note = sugar modification: 2'-O-methoxyethylribose; note = backbone modification: 5'-phosphorothioate
  modified_base 6: mod_base = OTHER; note = sugar modification: 2'-O-methoxyethylribose; note = thymine; note = backbone modification: 5'-phosphorothioate
  modified_base 7: mod_base = m5c; mod_base = OTHER; note = backbone modification: 5'-phosphorothioate; note = sugar modification: 2'-O-methoxyethylribose
  modified_base 8: mod_base = OTHER; note = thymine; note = sugar modification: 2'-O-methoxyethylribose; note = backbone modification: 5'-phosphorothioate
  modified_base 9: mod_base = OTHER; note = backbone modification: 5'-phosphorothioate; note = sugar modification: 2'-O-methoxyethylribose; note = thymine
  modified_base 10: mod_base = OTHER; note = backbone modification: 5'-phosphorothioate; note = sugar modification: 2'-O-methoxyethylribose
  modified_base 11: mod_base = OTHER; note = backbone modification: 5'-phosphorothioate; note = sugar modification: 2'-O-methoxyethylribose; note = thymine
  modified_base 12: mod_base = OTHER; note = sugar modification: 2'-O-methoxyethylribose; note = backbone modification: 5'-phosphorothioate
  modified_base 13: mod_base = m5c; mod_base = OTHER; note = backbone modification: 5'-phosphorothioate; note = sugar modification: lna
  modified_base 14: mod_base = OTHER; note = backbone modification: 5'-phosphorothioate; note = thymine; note = sugar modification: lna
  modified_base 15: mod_base = OTHER; note = sugar modification: lna; note = backbone modification: 5'-phosphorothioate; note = thymine
  modified_base 16: mod_base = m5c; mod_base = OTHER; note = sugar modification: lna
ggtgttcttgtacttc

SEQ ID NO: 1074 - RNA, 16 nt, synthetic construct
  source 1..16: mol_type = other RNA; note = Antisense oligonucleotide
  modified_base 1: mod_base = OTHER; note = backbone modification: 5'-phosphorothioate; note = sugar modification: lna
  modified_base 2: mod_base = OTHER; note = sugar modification: lna; note = backbone modification: 5'-phosphorothioate
  modified_base 3: mod_base = OTHER; note = backbone modification: 5'-phosphorothioate; note = thymine; note = sugar modification: lna
  modified_base 4: mod_base = OTHER; note = sugar modification: lna; note = backbone modification: 5'-phosphorothioate
  modified_base 5: mod_base = OTHER; note = backbone modification: 5'-phosphorothioate; note = thymine; note = sugar modification: lna
  modified_base 6: mod_base = OTHER; note = backbone modification: 5'-phosphorothioate; note = sugar modification: 2'-O-methoxyethylribose; note = thymine
  modified_base 7: mod_base = m5c; mod_base = OTHER; note = backbone modification: 5'-phosphorothioate; note = sugar modification: 2'-O-methoxyethylribose
  modified_base 8: mod_base = OTHER; note = thymine; note = backbone modification: 5'-phosphorothioate; note = sugar modification: 2'-O-methoxyethylribose
  modified_base 9: mod_base = OTHER; note = sugar modification: 2'-O-methoxyethylribose; note = thymine; note = backbone modification: 5'-phosphorothioate
  modified_base 10: mod_base = OTHER; note = backbone modification: 5'-phosphorothioate; note = sugar modification: 2'-O-methoxyethylribose
  modified_base 11: mod_base = OTHER; note = backbone modification: 5'-phosphorothioate; note = sugar modification: 2'-O-methoxyethylribose; note = thymine
  modified_base 12: mod_base = OTHER; note = sugar modification: lna; note = backbone modification: 5'-phosphorothioate
  modified_base 13: mod_base = m5c; mod_base = OTHER; note = sugar modification: lna; note = backbone modification: 5'-phosphorothioate
  modified_base 14: mod_base = OTHER; note = sugar modification: lna; note = backbone modification: 5'-phosphorothioate; note = thymine
  modified_base 15: mod_base = OTHER; note = backbone modification: 5'-phosphorothioate; note = thymine; note = sugar modification: lna
  modified_base 16: mod_base = m5c; mod_base = OTHER; note = sugar modification: lna
ggtgttcttgtacttc

SEQ ID NO: 1075 - RNA, 16 nt, synthetic construct
  source 1..16: mol_type = other RNA; note = Antisense oligonucleotide
  modified_base 1: mod_base = OTHER; note = backbone modification: 5'-phosphorothioate; note = sugar modification: 2'-O-methoxyethylribose
  modified_base 2: mod_base = OTHER; note = sugar modification: 2'-O-methoxyethylribose; note = backbone modification: 5'-phosphorothioate
  modified_base 3: mod_base = OTHER; note = thymine; note = backbone modification: 5'-phosphorothioate; note = sugar modification: 2'-O-methoxyethylribose
  modified_base 4: mod_base = OTHER; note = sugar modification: 2'-O-methoxyethylribose; note = backbone modification: 5'-phosphorothioate
  modified_base 5: mod_base = OTHER; note = backbone modification: 5'-phosphorothioate; note = sugar modification: 2'-O-methoxyethylribose; note = thymine
  modified_base 6: mod_base = OTHER; note = backbone modification: 5'-phosphorothioate; note = sugar modification: 2'-O-methoxyethylribose; note = thymine
  modified_base 7: mod_base = OTHER; mod_base = m5c; note = backbone modification: 5'-phosphorothioate; note = sugar modification: 2'-O-methoxyethylribose
  modified_base 8: mod_base = OTHER; note = backbone modification: 5'-phosphorothioate; note = thymine; note = sugar modification: 2'-O-methoxyethylribose
  modified_base 9: mod_base = OTHER; note = sugar modification: 2'-O-methoxyethylribose; note = thymine; note = backbone modification: 5'-phosphorothioate
  modified_base 10: mod_base = OTHER; note = backbone modification: 5'-phosphorothioate; note = sugar modification: 2'-O-methoxyethylribose
  modified_base 11: mod_base = OTHER; note = sugar modification: 2'-O-methoxyethylribose; note = thymine; note = backbone modification: 5'-phosphorothioate
  modified_base 12: mod_base = OTHER; note = sugar modification: 2'-O-methoxyethylribose; note = backbone modification: 5'-phosphorothioate
  modified_base 13: mod_base = OTHER; mod_base = m5c; note = backbone modification: 5'-phosphorothioate; note = sugar modification: 2'-O-methoxyethylribose
  modified_base 14: mod_base = OTHER; note = backbone modification: 5'-phosphorothioate; note = sugar modification: 2'-O-methoxyethylribose; note = thymine
  modified_base 15: mod_base = OTHER; note = sugar modification: 2'-O-methoxyethylribose; note = backbone modification: 5'-phosphorothioate; note = thymine
  modified_base 16: mod_base = OTHER; mod_base = m5c; note = sugar modification: lna
ggtgttcttgtacttc

SEQ ID NO: 1076 - RNA, 16 nt, synthetic construct
  source 1..16: mol_type = other RNA; note = Antisense oligonucleotide
  modified_base 1: mod_base = OTHER; note = backbone modification: 5'-phosphorothioate; note = sugar modification: 2'-O-methoxyethylribose
  modified_base 2: mod_base = OTHER; note = backbone modification: 5'-phosphorothioate; note = sugar modification: 2'-O-methoxyethylribose
  modified_base 3: mod_base = OTHER; note = backbone modification: 5'-phosphorothioate; note = thymine; note = sugar modification: 2'-O-methoxyethylribose
  modified_base 4: mod_base = OTHER; note = sugar modification: 2'-O-methoxyethylribose; note = backbone modification: 5'-phosphorothioate
  modified_base 5: mod_base = OTHER; note = backbone modification: 5'-phosphorothioate; note = thymine; note = sugar modification: 2'-O-methoxyethylribose
  modified_base 6: mod_base = OTHER; note = thymine; note = backbone modification: 5'-phosphorothioate; note = sugar modification: 2'-O-methoxyethylribose
  modified_base 7: mod_base = m5c; mod_base = OTHER; note = backbone modification: 5'-phosphorothioate; note = sugar modification: 2'-O-methoxyethylribose
  modified_base 8: mod_base = OTHER; note = sugar modification: 2'-O-methoxyethylribose; note = thymine; note = backbone modification: 5'-phosphorothioate
  modified_base 9: mod_base = OTHER; note = sugar modification: 2'-O-methoxyethylribose; note = backbone modification: 5'-phosphorothioate; note = thymine
  modified_base 10: mod_base = OTHER; note = backbone modification: 5'-phosphorothioate; note = sugar modification: 2'-O-methoxyethylribose
  modified_base 11: mod_base = OTHER; note = backbone modification: 5'-phosphorothioate; note = sugar modification: 2'-O-methoxyethylribose; note = thymine
  modified_base 12: mod_base = OTHER; note = backbone modification: 5'-phosphorothioate; note = sugar modification: 2'-O-methoxyethylribose
  modified_base 13: mod_base = OTHER; mod_base = m5c; note = backbone modification: 5'-phosphorothioate; note = sugar modification: 2'-O-methoxyethylribose
  modified_base 14: mod_base = OTHER; note = thymine; note = backbone modification: 5'-phosphorothioate; note = sugar modification: 2'-O-methoxyethylribose
  modified_base 15: mod_base = OTHER; note = sugar modification: lna; note = thymine; note = backbone modification: 5'-phosphorothioate
  modified_base 16: mod_base = OTHER; mod_base = m5c; note = sugar modification: lna
ggtgttcttgtacttc

SEQ ID NO: 1077 - RNA, 16 nt, synthetic construct
  source 1..16: mol_type = other RNA; note = Antisense oligonucleotide
  modified_base 1: mod_base = OTHER; note = backbone modification: 5'-phosphorothioate; note = sugar modification: 2'-O-methoxyethylribose
  modified_base 2: mod_base = OTHER; note = sugar modification: 2'-O-methoxyethylribose; note = backbone modification: 5'-phosphorothioate
  modified_base 3: mod_base = OTHER; note = backbone modification: 5'-phosphorothioate; note = sugar modification: 2'-O-methoxyethylribose; note = thymine
  modified_base 4: mod_base = OTHER; note = backbone modification: 5'-phosphorothioate; note = sugar modification: 2'-O-methoxyethylribose
  modified_base 5: mod_base = OTHER; note = sugar modification: 2'-O-methoxyethylribose; note = backbone modification: 5'-phosphorothioate; note = thymine
  modified_base 6: mod_base = OTHER; note = sugar modification: 2'-O-methoxyethylribose; note = thymine; note = backbone modification: 5'-phosphorothioate
  modified_base 7: mod_base = m5c; mod_base = OTHER; note = sugar modification: 2'-O-methoxyethylribose; note = backbone modification: 5'-phosphorothioate
  modified_base 8: mod_base = OTHER; note = sugar modification: 2'-O-methoxyethylribose; note = thymine; note = backbone modification: 5'-phosphorothioate
  modified_base 9: mod_base = OTHER; note = backbone modification: 5'-phosphorothioate; note = thymine; note = sugar modification: 2'-O-methoxyethylribose
  modified_base 10: mod_base = OTHER; note = sugar modification: 2'-O-methoxyethylribose; note = backbone modification: 5'-phosphorothioate
  modified_base 11: mod_base = OTHER; note = backbone modification: 5'-phosphorothioate; note = sugar modification: 2'-O-methoxyethylribose; note = thymine
  modified_base 12: mod_base = OTHER; note = backbone modification: 5'-phosphorothioate; note = sugar modification: 2'-O-methoxyethylribose
  modified_base 13: mod_base = OTHER; mod_base = m5c; note = backbone modification: 5'-phosphorothioate; note = sugar modification: 2'-O-methoxyethylribose
  modified_base 14: mod_base = OTHER; note = sugar modification: lna; note = thymine; note = backbone modification: 5'-phosphorothioate
  modified_base 15: mod_base = OTHER; note = backbone modification: 5'-phosphorothioate; note = sugar modification: lna; note = thymine
  modified_base 16: mod_base = OTHER; mod_base = m5c; note = sugar modification: lna
ggtgttcttgtacttc

SEQ ID NO: 1078 - RNA, 15 nt, synthetic construct
  source 1..15: mol_type = other RNA; note = Antisense oligonucleotide
  modified_base 1: mod_base = OTHER; note = sugar modification: lna; note = backbone modification: 5'-phosphorothioate
  modified_base 2: mod_base = OTHER; note = backbone modification: 5'-phosphorothioate; note = sugar modification: lna; note = thymine
  modified_base 3: mod_base = OTHER; note = backbone modification: 5'-phosphorothioate; note = sugar modification: 2'-O-methoxyethylribose; note = thymine
  modified_base 4: mod_base = OTHER; mod_base = m5c; note = sugar modification: 2'-O-methoxyethylribose; note = backbone modification: 5'-phosphorothioate
  modified_base 5: mod_base = OTHER; note = thymine; note = sugar modification: 2'-O-methoxyethylribose; note = backbone modification: 5'-phosphorothioate
  modified_base 6: mod_base = OTHER; note = backbone modification: 5'-phosphorothioate; note = thymine; note = sugar modification: 2'-O-methoxyethylribose
  modified_base 7: mod_base = OTHER; note = sugar modification: 2'-O-methoxyethylribose; note = backbone modification: 5'-phosphorothioate
  modified_base 8: mod_base = OTHER; note = sugar modification: 2'-O-methoxyethylribose; note = thymine; note = backbone modification: 5'-phosphorothioate
  modified_base 9: mod_base = OTHER; note = sugar modification: 2'-O-methoxyethylribose; note = backbone modification: 5'-phosphorothioate
  modified_base 10: mod_base = OTHER; mod_base = m5c; note = sugar modification: 2'-O-methoxyethylribose; note = backbone modification: 5'-phosphorothioate
  modified_base 11: mod_base = OTHER; note = thymine; note = sugar modification: 2'-O-methoxyethylribose; note = backbone modification: 5'-phosphorothioate
  modified_base 12: mod_base = OTHER; note = sugar modification: 2'-O-methoxyethylribose; note = thymine; note = backbone modification: 5'-phosphorothioate
  modified_base 13: mod_base = m5c; mod_base = OTHER; note = sugar modification: lna; note = backbone modification: 5'-phosphorothioate
  modified_base 14: mod_base = OTHER; note = sugar modification: 2'-O-methoxyethylribose; note = backbone modification: 5'-phosphorothioate
  modified_base 15: mod_base = OTHER; note = sugar modification: lna; note = thymine
gttcttgtacttcat

SEQ ID NO: 1079 - RNA, 15 nt, synthetic construct
  source 1..15: mol_type = other RNA; note = Antisense oligonucleotide
  modified_base 1: mod_base = OTHER; note = backbone modification: 5'-phosphorothioate; note = sugar modification: lna
  modified_base 2: mod_base = OTHER; note = sugar modification: 2'-O-methoxyethylribose; note = backbone modification: 5'-phosphorothioate; note = thymine
  modified_base 3: mod_base = OTHER; note = thymine; note = backbone modification: 5'-phosphorothioate; note = sugar modification: 2'-O-methoxyethylribose
  modified_base 4: mod_base = m5c; mod_base = OTHER; note = sugar modification: 2'-O-methoxyethylribose; note = backbone modification: 5'-phosphorothioate
  modified_base 5: mod_base = OTHER; note = backbone modification: 5'-phosphorothioate; note = thymine; note = sugar modification: 2'-O-methoxyethylribose
  modified_base 6: mod_base = OTHER; note = backbone modification: 5'-phosphorothioate; note = sugar modification: 2'-O-methoxyethylribose; note = thymine
  modified_base 7: mod_base = OTHER; note = backbone modification: 5'-phosphorothioate; note = sugar modification: 2'-O-methoxyethylribose
  modified_base 8: mod_base = OTHER; note = sugar modification: 2'-O-methoxyethylribose; note = backbone modification: 5'-phosphorothioate; note = thymine
  modified_base 9: mod_base = OTHER; note = backbone modification: 5'-phosphorothioate; note = sugar modification: 2'-O-methoxyethylribose
  modified_base 10: mod_base = OTHER; mod_base = m5c; note = sugar modification: 2'-O-methoxyethylribose; note = backbone modification: 5'-phosphorothioate
  modified_base 11: mod_base = OTHER; note = sugar modification: 2'-O-methoxyethylribose; note = thymine; note = backbone modification: 5'-phosphorothioate
  modified_base 12: mod_base = OTHER; note = thymine; note = backbone modification: 5'-phosphorothioate; note = sugar modification: 2'-O-methoxyethylribose
  modified_base 13: mod_base = OTHER; mod_base = m5c; note = sugar modification: lna; note = backbone modification: 5'-phosphorothioate
  modified_base 14: mod_base = OTHER; note = backbone modification: 5'-phosphorothioate; note = sugar modification: 2'-O-methoxyethylribose
  modified_base 15: mod_base = OTHER; note = sugar modification: lna; note = thymine
gttcttgtacttcat

SEQ ID NO: 1080 - RNA, 15 nt, synthetic construct
  source 1..15: mol_type = other RNA; note = Antisense oligonucleotide
  modified_base 1: mod_base = OTHER; note = sugar modification: 2'-O-methoxyethylribose; note = backbone modification: 5'-phosphorothioate
  modified_base 2: mod_base = OTHER; note = thymine; note = sugar modification: lna; note = backbone modification: 5'-phosphorothioate
  modified_base 3: mod_base = OTHER; note = backbone modification: 5'-phosphorothioate; note = thymine; note = sugar modification: 2'-O-methoxyethylribose
  modified_base 4: mod_base = OTHER; mod_base = m5c; note = backbone modification: 5'-phosphorothioate; note = sugar modification: 2'-O-methoxyethylribose
  modified_base 5: mod_base = OTHER; note = sugar modification: 2'-O-methoxyethylribose; note = backbone modification: 5'-phosphorothioate; note = thymine
  modified_base 6: mod_base = OTHER; note = thymine; note = sugar modification: 2'-O-methoxyethylribose; note = backbone modification: 5'-phosphorothioate
  modified_base 7: mod_base = OTHER; note = sugar modification: 2'-O-methoxyethylribose; note = backbone modification: 5'-phosphorothioate
  modified_base 8: mod_base = OTHER; note = sugar modification: 2'-O-methoxyethylribose; note = backbone modification: 5'-phosphorothioate; note = thymine
  modified_base 9: mod_base = OTHER; note = backbone modification: 5'-phosphorothioate; note = sugar modification: 2'-O-methoxyethylribose
  modified_base 10: mod_base = OTHER; mod_base = m5c; note = sugar modification: 2'-O-methoxyethylribose; note = backbone modification: 5'-phosphorothioate
  modified_base 11: mod_base = OTHER; note = backbone modification: 5'-phosphorothioate; note = thymine; note = sugar modification: 2'-O-methoxyethylribose
  modified_base 12: mod_base = OTHER; note = backbone modification: 5'-phosphorothioate; note = thymine; note = sugar modification: 2'-O-methoxyethylribose
  modified_base 13: mod_base = m5c; mod_base = OTHER; note = backbone modification: 5'-phosphorothioate; note = sugar modification: lna
  modified_base 14: mod_base = OTHER; note = sugar modification: 2'-O-methoxyethylribose; note = backbone modification: 5'-phosphorothioate
  modified_base 15: mod_base = OTHER; note = sugar modification: lna; note = thymine
gttcttgtacttcat

SEQ ID NO: 1081 - RNA, 15 nt, synthetic construct
  source 1..15: mol_type = other RNA; note = Antisense oligonucleotide
  modified_base 1: mod_base = OTHER; note = backbone modification: 5'-phosphorothioate; note = sugar modification: lna
  modified_base 2: mod_base = OTHER; note = backbone modification: 5'-phosphorothioate; note = sugar modification: lna; note = thymine
  modified_base 3: mod_base = OTHER; note = backbone modification: 5'-phosphorothioate; note = sugar modification: 2'-O-methoxyethylribose; note = thymine
  modified_base 4: mod_base = OTHER; mod_base = m5c; note = sugar modification: 2'-O-methoxyethylribose; note = backbone modification: 5'-phosphorothioate
  modified_base 5: mod_base = OTHER; note = sugar modification: 2'-O-methoxyethylribose; note = thymine; note = backbone modification: 5'-phosphorothioate
  modified_base 6: mod_base = OTHER; note = thymine; note = backbone modification: 5'-phosphorothioate; note = sugar modification: 2'-O-methoxyethylribose
  modified_base 7: mod_base = OTHER; note = backbone modification: 5'-phosphorothioate; note = sugar modification: 2'-O-methoxyethylribose
  modified_base 8: mod_base = OTHER; note = backbone modification: 5'-phosphorothioate; note = thymine; note = sugar modification: 2'-O-methoxyethylribose
  modified_base 9: mod_base = OTHER; note = sugar modification: 2'-O-methoxyethylribose; note = backbone modification: 5'-phosphorothioate
  modified_base 10: mod_base = m5c; mod_base = OTHER; note = backbone modification: 5'-phosphorothioate; note = sugar modification: 2'-O-methoxyethylribose
  modified_base 11: mod_base = OTHER; note = backbone modification: 5'-phosphorothioate; note = thymine; note = sugar modification: 2'-O-methoxyethylribose
  modified_base 12: mod_base = OTHER; note = sugar modification: 2'-O-methoxyethylribose; note = thymine; note = backbone modification: 5'-phosphorothioate
  modified_base 13: mod_base = OTHER; mod_base = m5c; note = sugar modification: lna; note = backbone modification: 5'-phosphorothioate
  modified_base 14: mod_base = OTHER; note = backbone modification: 5'-phosphorothioate; note = sugar modification: lna
  modified_base 15: mod_base = OTHER; note = sugar modification: 2'-O-methoxyethylribose; note = thymine
gttcttgtacttcat

SEQ ID NO: 1082 - RNA, 15 nt, synthetic construct
  source 1..15: mol_type = other RNA; note = Antisense oligonucleotide
  modified_base 1: mod_base = OTHER; note = sugar modification: lna; note = backbone modification: 5'-phosphorothioate
  modified_base 2: mod_base = OTHER; note = sugar modification: 2'-O-methoxyethylribose; note = thymine; note = backbone modification: 5'-phosphorothioate
  modified_base 3: mod_base = OTHER; note = thymine; note = backbone modification: 5'-phosphorothioate; note = sugar modification: 2'-O-methoxyethylribose
  modified_base 4: mod_base = m5c; mod_base = OTHER; note = sugar modification: 2'-O-methoxyethylribose; note = backbone modification: 5'-phosphorothioate
  modified_base 5: mod_base = OTHER; note = sugar modification: 2'-O-methoxyethylribose; note = backbone modification: 5'-phosphorothioate; note = thymine
  modified_base 6: mod_base = OTHER; note = backbone modification: 5'-phosphorothioate; note = thymine; note = sugar modification: 2'-O-methoxyethylribose
  modified_base 7: mod_base = OTHER; note = sugar modification: 2'-O-methoxyethylribose; note = backbone modification: 5'-phosphorothioate
  modified_base 8: mod_base = OTHER; note = sugar modification: 2'-O-methoxyethylribose; note = thymine; note = backbone modification: 5'-phosphorothioate
  modified_base 9: mod_base = OTHER; note = backbone modification: 5'-phosphorothioate; note = sugar modification: 2'-O-methoxyethylribose
  modified_base 10: mod_base = OTHER; mod_base = m5c; note = backbone modification: 5'-phosphorothioate; note = sugar modification: 2'-O-methoxyethylribose
  modified_base 11: mod_base = OTHER; note = sugar modification: 2'-O-methoxyethylribose; note = thymine; note = backbone modification: 5'-phosphorothioate
  modified_base 12: mod_base = OTHER; note = sugar modification: 2'-O-methoxyethylribose; note = backbone modification: 5'-phosphorothioate; note = thymine
  modified_base 13: mod_base = m5c; mod_base = OTHER; note = sugar modification: lna; note = backbone modification: 5'-phosphorothioate
  modified_base 14: mod_base = OTHER; note = backbone modification: 5'-phosphorothioate; note = sugar modification: lna
  modified_base 15: mod_base = OTHER; note = sugar modification: 2'-O-methoxyethylribose; note = thymine
gttcttgtacttcat

SEQ ID NO: 1083 - RNA, 15 nt, synthetic construct
  source 1..15: mol_type = other RNA; note = Antisense oligonucleotide
  modified_base 1: mod_base = OTHER; note = sugar modification: 2'-O-methoxyethylribose; note = backbone modification: 5'-phosphorothioate
  modified_base 2: mod_base = OTHER; note = sugar modification: lna; note = backbone modification: 5'-phosphorothioate; note = thymine
  modified_base 3: mod_base = OTHER; note = backbone modification: 5'-phosphorothioate; note = sugar modification: 2'-O-methoxyethylribose; note = thymine
  modified_base 4: mod_base = OTHER; mod_base = m5c; note = backbone modification: 5'-phosphorothioate; note = sugar modification: 2'-O-methoxyethylribose
  modified_base 5: mod_base = OTHER; note = backbone modification: 5'-phosphorothioate; note = thymine; note = sugar modification: 2'-O-methoxyethylribose
  modified_base 6: mod_base = OTHER; note = sugar modification: 2'-O-methoxyethylribose; note = thymine; note = backbone modification: 5'-phosphorothioate
  modified_base 7: mod_base = OTHER; note = sugar modification: 2'-O-methoxyethylribose; note = backbone modification: 5'-phosphorothioate
  modified_base 8: mod_base = OTHER; note = backbone modification: 5'-phosphorothioate; note = thymine; note = sugar modification: 2'-O-methoxyethylribose
  modified_base 9: mod_base = OTHER; note = backbone modification: 5'-phosphorothioate; note = sugar modification: 2'-O-methoxyethylribose
  modified_base 10: mod_base = OTHER; mod_base = m5c; note = sugar modification: 2'-O-methoxyethylribose; note = backbone modification: 5'-phosphorothioate
  modified_base 11: mod_base = OTHER; note = backbone modification: 5'-phosphorothioate; note = thymine; note = sugar modification: 2'-O-methoxyethylribose
  modified_base 12: mod_base = OTHER; note = backbone modification: 5'-phosphorothioate; note = sugar modification: 2'-O-methoxyethylribose; note = thymine
  modified_base 13: mod_base = m5c; mod_base = OTHER; note = backbone modification: 5'-phosphorothioate; note = sugar modification: lna
  modified_base 14: mod_base = OTHER; note = backbone modification: 5'-phosphorothioate; note = sugar modification: lna
  modified_base 15: mod_base = OTHER; note = sugar modification: 2'-O-methoxyethylribose; note = thymine
gttcttgtacttcat

SEQ ID NO: 1084 - RNA, 15 nt, synthetic construct
  source 1..15: mol_type = other RNA; note = Antisense oligonucleotide
  modified_base 1: mod_base = OTHER; note = sugar modification: 2'-O-methoxyethylribose; note = backbone modification: 5'-phosphorothioate
  modified_base 2: mod_base = OTHER; note = sugar modification: lna; note = backbone modification: 5'-phosphorothioate; note = thymine
  modified_base 3: mod_base = OTHER; note = thymine; note = sugar modification: 2'-O-methoxyethylribose; note = backbone modification: 5'-phosphorothioate
  modified_base 4: mod_base = OTHER; mod_base = m5c; note = backbone modification: 5'-phosphorothioate; note = sugar modification: 2'-O-methoxyethylribose
  modified_base 5: mod_base = OTHER; note = thymine; note = backbone modification: 5'-phosphorothioate; note = sugar modification: 2'-O-methoxyethylribose
  modified_base 6: mod_base = OTHER; note = thymine; note = backbone modification: 5'-phosphorothioate; note = sugar modification: 2'-O-methoxyethylribose
  modified_base 7: mod_base = OTHER; note = backbone modification: 5'-phosphorothioate; note = sugar modification: 2'-O-methoxyethylribose
  modified_base 8: mod_base = OTHER; note = sugar modification: 2'-O-methoxyethylribose; note = backbone modification: 5'-phosphorothioate; note = thymine
  modified_base 9: mod_base = OTHER; note = backbone modification: 5'-phosphorothioate; note = sugar modification: 2'-O-methoxyethylribose
  modified_base 10: mod_base = m5c; mod_base = OTHER; note = backbone modification: 5'-phosphorothioate; note = sugar modification: 2'-O-methoxyethylribose
  modified_base 11: mod_base = OTHER; note = backbone modification: 5'-phosphorothioate; note = sugar modification: 2'-O-methoxyethylribose; note = thymine
  modified_base 12: mod_base = OTHER; note = backbone modification: 5'-phosphorothioate; note = thymine; note = sugar modification: 2'-O-methoxyethylribose
  modified_base 13: mod_base = m5c; mod_base = OTHER; note = backbone modification: 5'-phosphorothioate; note = sugar modification: 2'-O-methoxyethylribose
  modified_base 14: mod_base = OTHER; note = sugar modification: lna; note = backbone modification: 5'-phosphorothioate
  modified_base 15: mod_base = OTHER; note = sugar modification: lna; note = thymine
gttcttgtacttcat

SEQ ID NO: 1085 - RNA, 15 nt, synthetic construct
  source 1..15: mol_type = other RNA; note = Antisense oligonucleotide
  modified_base 1: mod_base = OTHER; note = sugar modification: lna; note = backbone modification: 5'-phosphorothioate
  modified_base 2: mod_base = OTHER; note = sugar modification: lna; note = backbone modification: 5'-phosphorothioate; note = thymine
  modified_base 3: mod_base = OTHER; note = sugar modification: 2'-O-methoxyethylribose; note = thymine; note = backbone modification: 5'-phosphorothioate
  modified_base 4: mod_base = m5c; mod_base = OTHER; note = backbone modification: 5'-phosphorothioate; note = sugar modification: lna
  modified_base 5: mod_base = OTHER; note = sugar modification: 2'-O-methoxyethylribose; note = thymine; note = backbone modification: 5'-phosphorothioate
  modified_base 6: mod_base = OTHER; note = sugar modification: 2'-O-methoxyethylribose; note = backbone modification: 5'-phosphorothioate; note = thymine
  modified_base 7: mod_base = OTHER; note = sugar modification: 2'-O-methoxyethylribose; note = backbone modification: 5'-phosphorothioate
  modified_base 8: mod_base = OTHER; note = thymine; note = sugar modification: 2'-O-methoxyethylribose; note = backbone modification: 5'-phosphorothioate
  modified_base 9: mod_base = OTHER; note = backbone modification: 5'-phosphorothioate; note = sugar modification: 2'-O-methoxyethylribose
  modified_base 10: mod_base = m5c; mod_base = OTHER; note = sugar modification: 2'-O-methoxyethylribose; note = backbone modification: 5'-phosphorothioate
  modified_base 11: mod_base = OTHER; note = sugar modification: 2'-O-methoxyethylribose; note = thymine; note = backbone modification: 5'-phosphorothioate
  modified_base 12: mod_base = OTHER; note = sugar modification: 2'-O-methoxyethylribose; note = backbone modification: 5'-phosphorothioate; note = thymine
  modified_base 13: mod_base = m5c; mod_base = OTHER; note = backbone modification: 5'-phosphorothioate; note = sugar modification: lna
  modified_base 14: mod_base = OTHER; note = backbone modification: 5'-phosphorothioate; note = sugar modification: lna
  modified_base 15: mod_base = OTHER; note = thymine; note = sugar modification: lna
gttcttgtacttcat

SEQ ID NO: 1086 - RNA, 15 nt, synthetic construct
  source 1..15: mol_type = other RNA; note = Antisense oligonucleotide
  modified_base 1: mod_base = OTHER; note = sugar modification: lna; note = backbone modification: 5'-phosphorothioate
  modified_base 2: mod_base = OTHER; note = thymine; note = sugar modification: lna; note = backbone modification: 5'-phosphorothioate
  modified_base 3: mod_base = OTHER; note = sugar modification: 2'-O-methoxyethylribose; note = thymine; note = backbone modification: 5'-phosphorothioate
  modified_base 4: mod_base = m5c; mod_base = OTHER; note = sugar modification: 2'-O-methoxyethylribose; note = backbone modification: 5'-phosphorothioate
  modified_base 5: mod_base = OTHER; note = sugar modification: lna; note = backbone modification: 5'-phosphorothioate; note = thymine
  modified_base 6: mod_base = OTHER; note = thymine; note = sugar modification: 2'-O-methoxyethylribose; note = backbone modification: 5'-phosphorothioate
  modified_base 7: mod_base = OTHER; note = sugar modification: 2'-O-methoxyethylribose; note = backbone modification: 5'-phosphorothioate
  modified_base 8: mod_base = OTHER; note = backbone modification: 5'-phosphorothioate; note = sugar modification: 2'-O-methoxyethylribose; note = thymine
  modified_base 9: mod_base = OTHER; note = backbone modification: 5'-phosphorothioate; note = sugar modification: 2'-O-methoxyethylribose
  modified_base 10: mod_base = OTHER; mod_base = m5c; note = sugar modification: 2'-O-methoxyethylribose; note = backbone modification: 5'-phosphorothioate
  modified_base 11: mod_base = OTHER; note = thymine; note = sugar modification: 2'-O-methoxyethylribose; note = backbone modification: 5'-phosphorothioate
  modified_base 12: mod_base = OTHER; note = backbone modification: 5'-phosphorothioate; note = sugar modification: 2'-O-methoxyethylribose; note = thymine
  modified_base 13: mod_base = m5c; mod_base = OTHER; note = backbone modification: 5'-phosphorothioate; note = sugar modification: lna
  modified_base 14: mod_base = OTHER; note = backbone modification: 5'-phosphorothioate; note = sugar modification: lna
  modified_base 15: mod_base = OTHER; note = sugar modification: lna; note = thymine
gttcttgtacttcat

SEQ ID NO: 1087 - RNA, 15 nt, synthetic construct
  source 1..15: mol_type = other RNA; note = Antisense oligonucleotide
  modified_base 1: mod_base = OTHER; note = sugar modification: lna; note = backbone modification: 5'-phosphorothioate
  modified_base 2: mod_base = OTHER; note = backbone modification: 5'-phosphorothioate; note = thymine; note = sugar modification: lna
  modified_base 3: mod_base = OTHER; note = backbone modification: 5'-phosphorothioate; note = thymine; note = sugar modification: 2'-O-methoxyethylribose
  modified_base 4: mod_base = OTHER; mod_base = m5c; note = sugar modification: 2'-O-methoxyethylribose; note = backbone modification: 5'-phosphorothioate
  modified_base 5: mod_base = OTHER; note = thymine; note = sugar modification: 2'-O-methoxyethylribose; note = backbone modification: 5'-phosphorothioate
  modified_base 6: mod_base = OTHER; note = backbone modification: 5'-phosphorothioate; note = thymine; note = sugar modification: lna
  modified_base 7: mod_base = OTHER; note = sugar modification: 2'-O-methoxyethylribose; note = backbone modification: 5'-phosphorothioate
  modified_base 8: mod_base = OTHER; note = backbone modification: 5'-phosphorothioate; note = sugar modification: 2'-O-methoxyethylribose; note = thymine
  modified_base 9: mod_base = OTHER; note = backbone modification: 5'-phosphorothioate; note = sugar modification: 2'-O-methoxyethylribose
  modified_base 10: mod_base = OTHER; mod_base = m5c; note = sugar modification: 2'-O-methoxyethylribose; note = backbone modification: 5'-phosphorothioate
  modified_base 11: mod_base = OTHER; note = sugar modification: 2'-O-methoxyethylribose; note = backbone modification: 5'-phosphorothioate; note = thymine
  modified_base 12: mod_base = OTHER; note = thymine; note = backbone modification: 5'-phosphorothioate; note = sugar modification: 2'-O-methoxyethylribose
  modified_base 13: mod_base = m5c; mod_base = OTHER; note = sugar modification: lna; note = backbone modification: 5'-phosphorothioate
  modified_base 14: mod_base = OTHER; note = sugar modification: lna; note = backbone modification: 5'-phosphorothioate
  modified_base 15: mod_base = OTHER; note = sugar modification: lna; note = thymine
gttcttgtacttcat

SEQ ID NO: 1088 - RNA, 15 nt, synthetic construct
  source 1..15: mol_type = other RNA; note = Antisense oligonucleotide
  modified_base 1: mod_base = OTHER; note = backbone modification: 5'-phosphorothioate; note = sugar modification: lna
  modified_base 2: mod_base = OTHER; note = thymine; note = backbone modification: 5'-phosphorothioate; note = sugar modification: lna
  modified_base 3: mod_base = OTHER; note = sugar modification: 2'-O-methoxyethylribose; note = thymine; note = backbone modification: 5'-phosphorothioate
  modified_base 4: mod_base = OTHER; mod_base = m5c; note = backbone modification: 5'-phosphorothioate; note = sugar modification: 2'-O-methoxyethylribose
  modified_base 5: mod_base = OTHER; note = sugar modification: 2'-O-methoxyethylribose; note = thymine; note = backbone modification: 5'-phosphorothioate
  modified_base 6: mod_base = OTHER; note = thymine; note = backbone modification: 5'-phosphorothioate; note = sugar modification: 2'-O-methoxyethylribose
  modified_base 7: mod_base = OTHER; note = backbone modification: 5'-phosphorothioate; note = sugar modification: lna
  modified_base 8: mod_base = OTHER; note = thymine; note = backbone modification: 5'-phosphorothioate; note = sugar modification: 2'-O-methoxyethylribose
  modified_base 9: mod_base = OTHER; note = backbone modification: 5'-phosphorothioate; note = sugar modification: 2'-O-methoxyethylribose
  modified_base 10: mod_base = OTHER; mod_base = m5c; note = sugar modification: 2'-O-methoxyethylribose; note = backbone modification: 5'-phosphorothioate
  modified_base 11: mod_base = OTHER; note = sugar modification: 2'-O-methoxyethylribose; note = backbone modification: 5'-phosphorothioate; note = thymine
  modified_base 12: mod_base = OTHER; note = thymine; note = sugar modification: 2'-O-methoxyethylribose; note = backbone modification: 5'-phosphorothioate
  modified_base 13: mod_base = OTHER; mod_base = m5c; note = backbone modification: 5'-phosphorothioate; note = sugar modification: lna
  modified_base 14: mod_base = OTHER; note = backbone modification: 5'-phosphorothioate; note = sugar modification: lna
  modified_base 15: mod_base = OTHER; note = sugar modification: lna; note = thymine
gttcttgtacttcat

SEQ ID NO: 1089 - RNA, 15 nt, synthetic construct
  source 1..15: mol_type = other RNA; note = Antisense oligonucleotide
  modified_base 1: mod_base = OTHER; note = sugar modification: lna; note = backbone modification: 5'-phosphorothioate
  modified_base 2: mod_base = OTHER; note = thymine; note = backbone modification: 5'-phosphorothioate; note = sugar modification: lna
  modified_base 3: mod_base = OTHER; note = thymine; note = backbone modification: 5'-phosphorothioate; note = sugar modification: 2'-O-methoxyethylribose
  modified_base 4: mod_base = OTHER; mod_base = m5c; note = sugar modification: 2'-O-methoxyethylribose; note = backbone modification: 5'-phosphorothioate
  modified_base 5: mod_base = OTHER; note = thymine; note = sugar modification: 2'-O-methoxyethylribose; note = backbone modification: 5'-phosphorothioate
  modified_base 6: mod_base = OTHER; note = thymine; note = sugar modification: 2'-O-methoxyethylribose; note = backbone modification: 5'-phosphorothioate
  modified_base 7: mod_base = OTHER; note = backbone modification: 5'-phosphorothioate; note = sugar modification: 2'-O-methoxyethylribose
  modified_base 8: mod_base = OTHER; note = thymine; note = backbone modification: 5'-phosphorothioate; note = sugar modification: lna
  modified_base 9: mod_base = OTHER; note = sugar modification: 2'-O-methoxyethylribose; note = backbone modification: 5'-phosphorothioate
  modified_base 10: mod_base = OTHER; mod_base = m5c; note = backbone modification: 5'-phosphorothioate; note = sugar modification: 2'-O-methoxyethylribose
  modified_base 11: mod_base = OTHER; note = sugar modification: 2'-O-methoxyethylribose; note = backbone modification: 5'-phosphorothioate; note = thymine
  modified_base 12: mod_base = OTHER; note = thymine; note = backbone modification: 5'-phosphorothioate; note = sugar modification: 2'-O-methoxyethylribose
  modified_base 13: mod_base = m5c; mod_base = OTHER; note = backbone modification: 5'-phosphorothioate; note = sugar modification: lna
  modified_base 14: mod_base = OTHER; note = sugar modification: lna; note = backbone modification: 5'-phosphorothioate
  modified_base 15: mod_base = OTHER; note = thymine; note = sugar modification: lna
gttcttgtacttcat

SEQ ID NO: 1090 - RNA, 15 nt, synthetic construct
  source 1..15: mol_type = other RNA; note = Antisense oligonucleotide
  modified_base 1: mod_base = OTHER; note = backbone modification: 5'-phosphorothioate; note = sugar modification: lna
  modified_base 2: mod_base = OTHER; note = sugar modification: lna; note = backbone modification: 5'-phosphorothioate; note = thymine
  modified_base 3: mod_base = OTHER; note = backbone modification: 5'-phosphorothioate; note = sugar modification: 2'-O-methoxyethylribose; note = thymine
  modified_base 4: mod_base = OTHER; mod_base = m5c; note = sugar modification: 2'-O-methoxyethylribose; note = backbone modification: 5'-phosphorothioate
  modified_base 5: mod_base = OTHER; note = thymine; note = backbone modification: 5'-phosphorothioate; note = sugar modification: 2'-O-methoxyethylribose
  modified_base 6: mod_base = OTHER; note = sugar modification: 2'-O-methoxyethylribose; note = thymine; note = backbone modification: 5'-phosphorothioate
  modified_base 7: mod_base = OTHER; note = backbone modification: 5'-phosphorothioate; note = sugar modification: 2'-O-methoxyethylribose
  modified_base 8: mod_base = OTHER; note = backbone modification: 5'-phosphorothioate; note = sugar modification: 2'-O-methoxyethylribose; note = thymine
  modified_base 9: mod_base = OTHER; note = sugar modification: lna; note = backbone modification: 5'-phosphorothioate
  modified_base 10: mod_base = OTHER; mod_base = m5c; note = backbone modification: 5'-phosphorothioate; note = sugar modification: 2'-O-methoxyethylribose
  modified_base 11: mod_base = OTHER; note = thymine; note = sugar modification: 2'-O-methoxyethylribose; note = backbone modification: 5'-phosphorothioate
  modified_base 12: mod_base = OTHER; note = thymine; note = backbone modification: 5'-phosphorothioate; note = sugar modification: 2'-O-methoxyethylribose
  modified_base 13: mod_base = m5c; mod_base = OTHER; note = backbone modification: 5'-phosphorothioate; note = sugar modification: lna
  modified_base 14: mod_base = OTHER; note = backbone modification: 5'-phosphorothioate; note = sugar modification: lna
  modified_base 15: mod_base = OTHER; note = sugar modification: lna; note = thymine
gttcttgtacttcat

SEQ ID NO: 1091 - RNA, 15 nt, synthetic construct
  source 1..15: mol_type = other RNA; note = Antisense oligonucleotide
  modified_base 1: mod_base = OTHER; note = sugar modification: lna; note = backbone modification: 5'-phosphorothioate
  modified_base 2: mod_base = OTHER; note = backbone modification: 5'-phosphorothioate; note = thymine; note = sugar modification: lna
  modified_base 3: mod_base = OTHER; note = backbone modification: 5'-phosphorothioate; note = sugar modification: 2'-O-methoxyethylribose; note = thymine
  modified_base 4: mod_base = OTHER; mod_base = m5c; note = backbone modification: 5'-phosphorothioate; note = sugar modification: 2'-O-methoxyethylribose
  modified_base 5: mod_base = OTHER; note = sugar modification: 2'-O-methoxyethylribose; note = backbone modification: 5'-phosphorothioate; note = thymine
  modified_base 6: mod_base = OTHER; note = thymine; note = backbone modification: 5'-phosphorothioate; note = sugar modification: 2'-O-methoxyethylribose
  modified_base 7: mod_base = OTHER; note = backbone modification: 5'-phosphorothioate; note = sugar modification: 2'-O-methoxyethylribose
  modified_base 8: mod_base = OTHER; note = backbone modification: 5'-phosphorothioate; note = thymine; note = sugar modification: 2'-O-methoxyethylribose
  modified_base 9: mod_base = OTHER; note = sugar modification: 2'-O-methoxyethylribose; note = backbone modification: 5'-phosphorothioate
  modified_base 10: mod_base = OTHER; mod_base = m5c; note = backbone modification: 5'-phosphorothioate; note = sugar modification: lna
  modified_base 11: mod_base = OTHER; note = backbone modification: 5'-phosphorothioate; note = thymine; note = sugar modification: 2'-O-methoxyethylribose
  modified_base 12: mod_base = OTHER; note = sugar modification: 2'-O-methoxyethylribose; note = backbone modification: 5'-phosphorothioate; note = thymine
  modified_base 13: mod_base = m5c; mod_base = OTHER; note = sugar modification: lna; note = backbone modification: 5'-phosphorothioate
  modified_base 14: mod_base = OTHER; note = backbone modification: 5'-phosphorothioate; note = sugar modification: lna
  modified_base 15: mod_base = OTHER; note = sugar modification: lna; note = thymine
gttcttgtacttcat

SEQ ID NO: 1092 - RNA, 15 nt, synthetic construct
  source 1..15: mol_type = other RNA; note = Antisense oligonucleotide
  modified_base 1: mod_base = OTHER; note = backbone modification: 5'-phosphorothioate; note = sugar modification: lna
  modified_base 2: mod_base = OTHER; note = backbone modification: 5'-phosphorothioate; note = thymine; note = sugar modification: lna
  modified_base 3: mod_base = OTHER; note = sugar modification: 2'-O-methoxyethylribose; note = thymine; note = backbone modification: 5'-phosphorothioate
  modified_base 4: mod_base = m5c; mod_base = OTHER; note = sugar modification: 2'-O-methoxyethylribose; note = backbone modification: 5'-phosphorothioate
  modified_base 5: mod_base = OTHER; note = sugar modification: 2'-O-methoxyethylribose; note = backbone modification: 5'-phosphorothioate; note = thymine
  modified_base 6: mod_base = OTHER; note = thymine; note = backbone modification: 5'-phosphorothioate; note = sugar modification: 2'-O-methoxyethylribose
  modified_base 7: mod_base = OTHER; note = sugar modification: 2'-O-methoxyethylribose; note = backbone modification: 5'-phosphorothioate
  modified_base 8: mod_base = OTHER; note = sugar modification: 2'-O-methoxyethylribose; note = backbone modification: 5'-phosphorothioate; note = thymine
  modified_base 9: mod_base = OTHER; note = sugar modification: 2'-O-methoxyethylribose; note = backbone modification: 5'-phosphorothioate
  modified_base 10: mod_base = OTHER; mod_base = m5c; note = backbone modification: 5'-phosphorothioate; note = sugar modification: 2'-O-methoxyethylribose
  modified_base 11: mod_base = OTHER; note = backbone modification: 5'-phosphorothioate; note = thymine; note = sugar modification: lna
  modified_base 12: mod_base = OTHER; note = backbone modification: 5'-phosphorothioate; note = thymine; note = sugar modification: 2'-O-methoxyethylribose
  modified_base 13: mod_base = OTHER; mod_base = m5c; note = sugar modification: lna; note = backbone modification: 5'-phosphorothioate
  modified_base 14: mod_base = OTHER; note = sugar modification: lna; note = backbone modification: 5'-phosphorothioate
  modified_base 15: mod_base = OTHER; note = thymine; note = sugar modification: lna
gttcttgtacttcat

SEQ ID NO: 1093 - RNA, 15 nt, synthetic construct
  source 1..15: mol_type = other RNA; note = Antisense oligonucleotide
  modified_base 1: mod_base = OTHER; note = sugar modification: lna; note = backbone modification: 5'-phosphorothioate
  modified_base 2: mod_base = OTHER; note = backbone modification: 5'-phosphorothioate; note = sugar modification: lna; note = thymine
  modified_base 3: mod_base = OTHER; note = backbone modification: 5'-phosphorothioate; note = sugar modification: 2'-O-methoxyethylribose; note = thymine
  modified_base 4: mod_base = OTHER; mod_base = m5c; note = backbone modification: 5'-phosphorothioate; note = sugar modification: 2'-O-methoxyethylribose
  modified_base 5: mod_base = OTHER; note = backbone modification: 5'-phosphorothioate; note = thymine; note = sugar modification: 2'-O-methoxyethylribose
  modified_base 6: mod_base = OTHER; note = sugar modification: 2'-O-methoxyethylribose; note = thymine; note = backbone modification: 5'-phosphorothioate
  modified_base 7: mod_base = OTHER; note = backbone modification: 5'-phosphorothioate; note = sugar modification: 2'-O-methoxyethylribose
  modified_base 8: mod_base = OTHER; note = backbone modification: 5'-phosphorothioate; note = thymine; note = sugar modification: 2'-O-methoxyethylribose
  modified_base 9: mod_base = OTHER; note = backbone modification: 5'-phosphorothioate; note = sugar modification: 2'-O-methoxyethylribose
  modified_base 10: mod_base = OTHER; mod_base = m5c; note = backbone modification: 5'-phosphorothioate; note = sugar modification: 2'-O-methoxyethylribose
  modified_base 11: mod_base = OTHER; note = backbone modification: 5'-phosphorothioate; note = thymine; note = sugar modification: 2'-O-methoxyethylribose
  modified_base 12: mod_base = OTHER; note = backbone modification: 5'-phosphorothioate; note = thymine; note = sugar modification: lna
  modified_base 13: mod_base = m5c; mod_base = OTHER; note = backbone modification: 5'-phosphorothioate; note = sugar modification: lna
  modified_base 14: mod_base = OTHER; note = backbone modification: 5'-phosphorothioate; note = sugar modification: lna
  modified_base 15: mod_base = OTHER; note = thymine; note = sugar modification: lna
gttcttgtacttcat

SEQ ID NO: 1094 - RNA, 16 nt, synthetic construct
  source 1..16: mol_type = other RNA; note = Antisense oligonucleotide
  modified_base 1: mod_base = OTHER; note = backbone modification: 5'-phosphorothioate; note = sugar modification: lna; note = thymine
  modified_base 2: mod_base = OTHER; note = sugar modification: 2'-O-methoxyethylribose; note = backbone modification: 5'-phosphorothioate
  modified_base 3: mod_base = OTHER; note = thymine; note = sugar modification: 2'-O-methoxyethylribose; note = backbone modification: 5'-phosphorothioate
  modified_base 4: mod_base = OTHER; note = thymine; note = backbone modification: 5'-phosphorothioate; note = sugar modification: 2'-O-methoxyethylribose
  modified_base 5: mod_base = OTHER; mod_base = m5c; note = sugar modification: 2'-O-methoxyethylribose; note = backbone modification: 5'-phosphorothioate
  modified_base 6: mod_base = OTHER; note = backbone modification: 5'-phosphorothioate; note = thymine; note = sugar modification: 2'-O-methoxyethylribose
  modified_base 7: mod_base = OTHER; note = thymine; note = backbone modification: 5'-phosphorothioate; note = sugar modification: 2'-O-methoxyethylribose
  modified_base 8: mod_base = OTHER; note = backbone modification: 5'-phosphorothioate; note = sugar modification: 2'-O-methoxyethylribose
  modified_base 9: mod_base = OTHER; note = backbone modification: 5'-phosphorothioate; note = thymine; note = sugar modification: 2'-O-methoxyethylribose
  modified_base 10: mod_base = OTHER; note = backbone modification: 5'-phosphorothioate; note = sugar modification: 2'-O-methoxyethylribose
  modified_base 11: mod_base = OTHER; mod_base = m5c; note = sugar modification: 2'-O-methoxyethylribose; note = backbone modification: 5'-phosphorothioate
  modified_base 12: mod_base = OTHER; note = backbone modification: 5'-phosphorothioate; note = sugar modification: 2'-O-methoxyethylribose; note = thymine
  modified_base 13: mod_base = OTHER; note = backbone modification: 5'-phosphorothioate; note = thymine; note = sugar modification: 2'-O-methoxyethylribose
  modified_base 14: mod_base = OTHER; mod_base = m5c; note = sugar modification: 2'-O-methoxyethylribose; note = backbone modification: 5'-phosphorothioate
  modified_base 15: mod_base = OTHER; note = backbone modification: 5'-phosphorothioate; note = sugar modification: lna
  modified_base 16: mod_base = OTHER; note = sugar modification: 2'-O-methoxyethylribose; note = thymine
tgttcttgtacttcat

SEQ ID NO: 1095 - RNA, 16 nt, synthetic construct
  source 1..16: mol_type = other RNA; note = Antisense oligonucleotide
  modified_base 1: mod_base = OTHER; note = sugar modification: 2'-O-methoxyethylribose; note = thymine; note = backbone modification: 5'-phosphorothioate
  modified_base 2: mod_base = OTHER; note = sugar modification: 2'-O-methoxyethylribose; note = backbone modification: 5'-phosphorothioate
  modified_base 3: mod_base = OTHER; note = backbone modification: 5'-phosphorothioate; note = sugar modification: 2'-O-methoxyethylribose; note = thymine
  modified_base 4: mod_base = OTHER; note = thymine; note = backbone modification: 5'-phosphorothioate; note = sugar modification: 2'-O-methoxyethylribose
  modified_base 5: mod_base = m5c; mod_base = OTHER; note = sugar modification: 2'-O-methoxyethylribose; note = backbone modification: 5'-phosphorothioate
  modified_base 6: mod_base = OTHER; note = thymine; note = backbone modification: 5'-phosphorothioate; note = sugar modification: 2'-O-methoxyethylribose
  modified_base 7: mod_base = OTHER; note = thymine; note = backbone modification: 5'-phosphorothioate; note = sugar modification: 2'-O-methoxyethylribose
  modified_base 8: mod_base = OTHER; note = backbone modification: 5'-phosphorothioate; note = sugar modification: 2'-O-methoxyethylribose
  modified_base 9: mod_base = OTHER; note = thymine; note = backbone modification: 5'-phosphorothioate; note = sugar modification: 2'-O-methoxyethylribose
  modified_base 10: mod_base = OTHER; note = backbone modification: 5'-phosphorothioate; note = sugar modification: 2'-O-methoxyethylribose
  modified_base 11: mod_base = OTHER; mod_base = m5c; note = sugar modification: 2'-O-methoxyethylribose; note = backbone modification: 5'-phosphorothioate
  modified_base 12: mod_base = OTHER; note = thymine; note = sugar modification: 2'-O-methoxyethylribose; note = backbone modification: 5'-phosphorothioate
  modified_base 13: mod_base = OTHER; note = backbone modification: 5'-phosphorothioate; note = thymine; note = sugar modification: 2'-O-methoxyethylribose
  modified_base 14: mod_base = m5c; mod_base = OTHER; note = sugar modification: 2'-O-methoxyethylribose; note = backbone modification: 5'-phosphorothioate
  modified_base 15: mod_base = OTHER; note = sugar modification: lna; note = backbone modification: 5'-phosphorothioate
  modified_base 16: mod_base = OTHER; note = sugar modification: 2'-O-methoxyethylribose; note = thymine
tgttcttgtacttcat

SEQ ID NO: 1096 - RNA, 16 nt, synthetic construct
  source 1..16: mol_type = other RNA; note = Antisense oligonucleotide
  modified_base 1: mod_base = OTHER; note = thymine; note = backbone modification: 5'-phosphorothioate; note = sugar modification: lna
  modified_base 2: mod_base = OTHER; note = backbone modification: 5'-phosphorothioate; note = sugar modification: 2'-O-methoxyethylribose
  modified_base 3: mod_base = OTHER; note = sugar modification: lna; note = thymine; note = backbone modification: 5'-phosphorothioate
  modified_base 4: mod_base = OTHER; note = sugar modification: 2'-O-methoxyethylribose; note = backbone modification: 5'-phosphorothioate; note = thymine
  modified_base 5: mod_base = m5c; mod_base = OTHER; note = backbone modification: 5'-phosphorothioate; note = sugar modification: 2'-O-methoxyethylribose
  modified_base 6: mod_base = OTHER; note = backbone modification: 5'-phosphorothioate; note = sugar modification: 2'-O-methoxyethylribose; note = thymine
  modified_base 7: mod_base = OTHER; note = sugar modification: 2'-O-methoxyethylribose; note = thymine; note = backbone modification: 5'-phosphorothioate
  modified_base 8: mod_base = OTHER; note = backbone modification: 5'-phosphorothioate; note = sugar modification: 2'-O-methoxyethylribose
  modified_base 9: mod_base = OTHER; note = sugar modification: 2'-O-methoxyethylribose; note = thymine; note = backbone modification: 5'-phosphorothioate
  modified_base 10: mod_base = OTHER; note = backbone modification: 5'-phosphorothioate; note = sugar modification: 2'-O-methoxyethylribose
  modified_base 11: mod_base = OTHER; mod_base = m5c; note = backbone modification: 5'-phosphorothioate; note = sugar modification: 2'-O-methoxyethylribose
  modified_base 12: mod_base = OTHER; note = backbone modification: 5'-phosphorothioate; note = sugar modification: 2'-O-methoxyethylribose; note = thymine
  modified_base 13: mod_base = OTHER; note = sugar modification: 2'-O-methoxyethylribose; note = backbone modification: 5'-phosphorothioate; note = thymine
  modified_base 14: mod_base = m5c; mod_base = OTHER; note = sugar modification: 2'-O-methoxyethylribose; note = backbone modification: 5'-phosphorothioate
  modified_base 15: mod_base = OTHER; note = backbone modification: 5'-phosphorothioate; note = sugar modification: lna
  modified_base 16: mod_base = OTHER; note = thymine; note = sugar modification: lna
tgttcttgtacttcat

SEQ ID NO: 1097 - RNA, 16 nt, synthetic construct
  source 1..16: mol_type = other RNA; note = Antisense oligonucleotide
  modified_base 1: mod_base = OTHER; note = sugar modification: lna; note = backbone modification: 5'-phosphorothioate; note = thymine
  modified_base 2: mod_base = OTHER; note = sugar modification: 2'-O-methoxyethylribose; note = backbone modification: 5'-phosphorothioate
  modified_base 3: mod_base = OTHER; note = thymine; note = backbone modification: 5'-phosphorothioate; note = sugar modification: 2'-O-methoxyethylribose
  modified_base 4: mod_base = OTHER; note = thymine; note = sugar modification: lna; note = backbone modification: 5'-phosphorothioate
  modified_base 5: mod_base = OTHER; mod_base = m5c; note = backbone modification: 5'-phosphorothioate; note = sugar modification: 2'-O-methoxyethylribose
  modified_base 6: mod_base = OTHER; note = thymine; note = sugar modification: 2'-O-methoxyethylribose; note = backbone modification: 5'-phosphorothioate
  modified_base 7: mod_base = OTHER; note = backbone modification: 5'-phosphorothioate; note = sugar modification: 2'-O-methoxyethylribose; note = thymine
  modified_base 8: mod_base = OTHER; note = backbone modification: 5'-phosphorothioate; note = sugar modification: 2'-O-methoxyethylribose
  modified_base 9: mod_base = OTHER; note = sugar modification: 2'-O-methoxyethylribose; note = thymine; note = backbone modification: 5'-phosphorothioate
  modified_base 10: mod_base = OTHER; note = sugar modification: 2'-O-methoxyethylribose; note = backbone modification: 5'-phosphorothioate
  modified_base 11: mod_base = OTHER; mod_base = m5c; note = backbone modification: 5'-phosphorothioate; note = sugar modification: 2'-O-methoxyethylribose
  modified_base 12: mod_base = OTHER; note = sugar modification: 2'-O-methoxyethylribose; note = thymine; note = backbone modification: 5'-phosphorothioate
  modified_base 13: mod_base = OTHER; note = sugar modification: 2'-O-methoxyethylribose; note = thymine; note = backbone modification: 5'-phosphorothioate
  modified_base 14: mod_base = OTHER; mod_base = m5c; note = sugar modification: 2'-O-methoxyethylribose; note = backbone modification: 5'-phosphorothioate
  modified_base 15: mod_base = OTHER; note = backbone modification: 5'-phosphorothioate; note = sugar modification: lna
  modified_base 16: mod_base = OTHER; note = thymine; note = sugar modification: lna
tgttcttgtacttcat

SEQ ID NO: 1098 - RNA, 16 nt, synthetic construct
  source 1..16: mol_type = other RNA; note = Antisense oligonucleotide
  modified_base 1: mod_base = OTHER; note = sugar modification: lna; note = thymine; note = backbone modification: 5'-phosphorothioate
  modified_base 2: mod_base = OTHER; note = sugar modification: 2'-O-methoxyethylribose; note = backbone modification: 5'-phosphorothioate
  modified_base 3: mod_base = OTHER; note = backbone modification: 5'-phosphorothioate; note = sugar modification: 2'-O-methoxyethylribose; note = thymine
  modified_base 4: mod_base = OTHER; note = backbone modification: 5'-phosphorothioate; note = thymine; note = sugar modification: 2'-O-methoxyethylribose
  modified_base 5: mod_base = OTHER; mod_base = m5c; note = sugar modification: lna; note = backbone modification: 5'-phosphorothioate
  modified_base 6: mod_base = OTHER; note = sugar modification: 2'-O-methoxyethylribose; note = thymine; note = backbone modification: 5'-phosphorothioate
  modified_base 7: mod_base = OTHER; note = sugar modification: 2'-O-methoxyethylribose; note = backbone modification: 5'-phosphorothioate; note = thymine
  modified_base 8: mod_base = OTHER; note = sugar modification: 2'-O-methoxyethylribose; note = backbone modification: 5'-phosphorothioate
  modified_base 9: mod_base = OTHER; note = thymine; note = sugar modification: 2'-O-methoxyethylribose; note = backbone modification: 5'-phosphorothioate
  modified_base 10: mod_base = OTHER; note = backbone modification: 5'-phosphorothioate; note = sugar modification: 2'-O-methoxyethylribose
  modified_base 11: mod_base = m5c; mod_base = OTHER; note = backbone modification: 5'-phosphorothioate; note = sugar modification: 2'-O-methoxyethylribose
  modified_base 12: mod_base = OTHER; note = backbone modification: 5'-phosphorothioate; note = sugar modification: 2'-O-methoxyethylribose; note = thymine
  modified_base 13: mod_base = OTHER; note = thymine; note = backbone modification: 5'-phosphorothioate; note = sugar modification: 2'-O-methoxyethylribose
  modified_base 14: mod_base = OTHER; mod_base = m5c; note = sugar modification: 2'-O-methoxyethylribose; note = backbone modification: 5'-phosphorothioate
  modified_base 15: mod_base = OTHER; note = sugar modification: lna; note = backbone modification: 5'-phosphorothioate
  modified_base 16: mod_base = OTHER; note = sugar modification: lna; note = thymine
tgttcttgtacttcat

SEQ ID NO: 1099 - RNA, 16 nt, synthetic construct
  source 1..16: mol_type = other RNA; note = Antisense oligonucleotide
  modified_base 1: mod_base = OTHER; note = backbone modification: 5'-phosphorothioate; note = thymine; note = sugar modification: lna
  modified_base 2: mod_base = OTHER; note = backbone modification: 5'-phosphorothioate; note = sugar modification: 2'-O-methoxyethylribose
  modified_base 3: mod_base = OTHER; note = backbone modification: 5'-phosphorothioate; note = sugar modification: 2'-O-methoxyethylribose; note = thymine
  modified_base 4: mod_base = OTHER; note = sugar modification: 2'-O-methoxyethylribose; note = backbone modification: 5'-phosphorothioate; note = thymine
  modified_base 5: mod_base = m5c; mod_base = OTHER; note = sugar modification: 2'-O-methoxyethylribose; note = backbone modification: 5'-phosphorothioate
  modified_base 6: mod_base = OTHER; note = sugar modification: lna; note = thymine; note = backbone modification: 5'-phosphorothioate
  modified_base 7: mod_base = OTHER; note = backbone modification: 5'-phosphorothioate; note = sugar modification: 2'-O-methoxyethylribose; note = thymine
  modified_base 8: mod_base = OTHER; note = backbone modification: 5'-phosphorothioate; note = sugar modification: 2'-O-methoxyethylribose
  modified_base 9: mod_base = OTHER; note = sugar modification: 2'-O-methoxyethylribose; note = backbone modification: 5'-phosphorothioate; note = thymine
  modified_base 10: mod_base = OTHER; note = sugar modification: 2'-O-methoxyethylribose; note = backbone modification: 5'-phosphorothioate
  modified_base 11: mod_base = m5c; mod_base = OTHER; note = sugar modification: 2'-O-methoxyethylribose; note = backbone modification: 5'-phosphorothioate
  modified_base 12: mod_base = OTHER; note = sugar modification: 2'-O-methoxyethylribose; note = backbone modification: 5'-phosphorothioate; note = thymine
  modified_base 13: mod_base = OTHER; note = backbone modification: 5'-phosphorothioate; note = sugar modification: 2'-O-methoxyethylribose; note = thymine
  modified_base 14: mod_base = m5c; mod_base = OTHER; note = sugar modification: 2'-O-methoxyethylribose; note = backbone modification: 5'-phosphorothioate
  modified_base 15: mod_base = OTHER; note = sugar modification: lna; note = backbone modification: 5'-phosphorothioate
  modified_base 16: mod_base = OTHER; note = sugar modification: lna; note = thymine
tgttcttgtacttcat

SEQ ID NO: 1100 - RNA, 16 nt, synthetic construct
  source 1..16: mol_type = other RNA; note = Antisense oligonucleotide
  modified_base 1: mod_base = OTHER; note = thymine; note = backbone modification: 5'-phosphorothioate; note = sugar modification: lna
  modified_base 2: mod_base = OTHER; note = sugar modification: 2'-O-methoxyethylribose; note = backbone modification: 5'-phosphorothioate
  modified_base 3: mod_base = OTHER; note = sugar modification: 2'-O-methoxyethylribose; note = backbone modification: 5'-phosphorothioate; note = thymine
  modified_base 4: mod_base = OTHER; note = thymine; note = sugar modification: 2'-O-methoxyethylribose; note = backbone modification: 5'-phosphorothioate
  modified_base 5: mod_base = m5c; mod_base = OTHER; note = backbone modification: 5'-phosphorothioate; note = sugar modification: 2'-O-methoxyethylribose
  modified_base 6: mod_base = OTHER; note = sugar modification: 2'-O-methoxyethylribose; note = thymine; note = backbone modification: 5'-phosphorothioate
  modified_base 7: mod_base = OTHER; note = backbone modification: 5'-phosphorothioate; note = sugar modification: lna; note = thymine
  modified_base 8: mod_base = OTHER; note = backbone modification: 5'-phosphorothioate; note = sugar modification: 2'-O-methoxyethylribose
  modified_base 9: mod_base = OTHER; note = thymine; note = sugar modification: 2'-O-methoxyethylribose; note = backbone modification: 5'-phosphorothioate
  modified_base 10: mod_base = OTHER; note = backbone modification: 5'-phosphorothioate; note = sugar modification: 2'-O-methoxyethylribose
  modified_base 11: mod_base = m5c; mod_base = OTHER; note = backbone modification: 5'-phosphorothioate; note = sugar modification: 2'-O-methoxyethylribose
  modified_base 12: mod_base = OTHER; note = backbone modification: 5'-phosphorothioate; note = thymine; note = sugar modification: 2'-O-methoxyethylribose
  modified_base 13: mod_base = OTHER; note = sugar modification: 2'-O-methoxyethylribose; note = backbone modification: 5'-phosphorothioate; note = thymine
  modified_base 14: mod_base = m5c; mod_base = OTHER; note = backbone modification: 5'-phosphorothioate; note = sugar modification: 2'-O-methoxyethylribose
  modified_base 15: mod_base = OTHER; note = backbone modification: 5'-phosphorothioate; note = sugar modification: lna
  modified_base 16: mod_base = OTHER; note = sugar modification: lna; note = thymine
tgttcttgtacttcat

SEQ ID NO: 1101 - RNA, 16 nt, synthetic construct
  source 1..16: mol_type = other RNA; note = Antisense oligonucleotide
  modified_base 1: mod_base = OTHER; note = backbone modification: 5'-phosphorothioate; note = thymine; note = sugar modification: lna
  modified_base 2: mod_base = OTHER; note = sugar modification: 2'-O-methoxyethylribose; note = backbone modification: 5'-phosphorothioate
  modified_base 3: mod_base = OTHER; note = thymine; note = sugar modification: 2'-O-methoxyethylribose; note = backbone modification: 5'-phosphorothioate
  modified_base 4: mod_base = OTHER; note = backbone modification: 5'-phosphorothioate; note = sugar modification: 2'-O-methoxyethylribose; note = thymine
  modified_base 5: mod_base = m5c; mod_base = OTHER; note = sugar modification: 2'-O-methoxyethylribose; note = backbone modification: 5'-phosphorothioate
  modified_base 6: mod_base = OTHER; note = thymine; note = sugar modification: 2'-O-methoxyethylribose; note = backbone modification: 5'-phosphorothioate
  modified_base 7: mod_base = OTHER; note = backbone modification: 5'-phosphorothioate; note = thymine; note = sugar modification: 2'-O-methoxyethylribose
  modified_base 8: mod_base = OTHER; note = backbone modification: 5'-phosphorothioate; note = sugar modification: lna
  modified_base 9: mod_base = OTHER; note = backbone modification: 5'-phosphorothioate; note = thymine; note = sugar modification: 2'-O-methoxyethylribose
  modified_base 10: mod_base = OTHER; note = backbone modification: 5'-phosphorothioate; note = sugar modification: 2'-O-methoxyethylribose
  modified_base 11: mod_base = OTHER; mod_base = m5c; note = sugar modification: 2'-O-methoxyethylribose; note = backbone modification: 5'-phosphorothioate
  modified_base 12: mod_base = OTHER; note = sugar modification: 2'-O-methoxyethylribose; note = thymine; note = backbone modification: 5'-phosphorothioate
  modified_base 13: mod_base = OTHER; note = thymine; note = sugar modification: 2'-O-methoxyethylribose; note = backbone modification: 5'-phosphorothioate
  modified_base 14: mod_base = OTHER; mod_base = m5c; note = sugar modification: 2'-O-methoxyethylribose; note = backbone modification: 5'-phosphorothioate
  modified_base 15: mod_base = OTHER; note = backbone modification: 5'-phosphorothioate; note = sugar modification: lna
  modified_base 16: mod_base = OTHER; note = sugar modification: lna; note = thymine
tgttcttgtacttcat

SEQ ID NO: 1102 - RNA, 16 nt, synthetic construct
  source 1..16: mol_type = other RNA; note = Antisense oligonucleotide
  modified_base 1: mod_base = OTHER; note = thymine; note = sugar modification: lna; note = backbone modification: 5'-phosphorothioate
  modified_base 2: mod_base = OTHER; note = sugar modification: 2'-O-methoxyethylribose; note = backbone modification: 5'-phosphorothioate
  modified_base 3: mod_base = OTHER; note = backbone modification: 5'-phosphorothioate; note = sugar modification: 2'-O-methoxyethylribose; note = thymine
  modified_base 4: mod_base = OTHER; note = backbone modification: 5'-phosphorothioate; note = sugar modification: 2'-O-methoxyethylribose; note = thymine
  modified_base 5: mod_base = OTHER; mod_base = m5c; note = sugar modification: 2'-O-methoxyethylribose; note = backbone modification: 5'-phosphorothioate
  modified_base 6: mod_base = OTHER; note = sugar modification: 2'-O-methoxyethylribose; note = backbone modification: 5'-phosphorothioate; note = thymine
  modified_base 7: mod_base = OTHER; note = backbone modification: 5'-phosphorothioate; note = sugar modification: 2'-O-methoxyethylribose; note = thymine
  modified_base 8: mod_base = OTHER; note = backbone modification: 5'-phosphorothioate; note = sugar modification: 2'-O-methoxyethylribose
  modified_base 9: mod_base = OTHER; note = backbone modification: 5'-phosphorothioate; note = thymine; note = sugar modification: lna
  modified_base 10: mod_base = OTHER; note = backbone modification: 5'-phosphorothioate; note = sugar modification: 2'-O-methoxyethylribose
  modified_base 11: mod_base = OTHER; mod_base = m5c; note = backbone modification: 5'-phosphorothioate; note = sugar modification: 2'-O-methoxyethylribose
  modified_base 12: mod_base = OTHER; note = backbone modification: 5'-phosphorothioate; note = sugar modification: 2'-O-methoxyethylribose; note = thymine
  modified_base 13: mod_base = OTHER; note = thymine; note = sugar modification: 2'-O-methoxyethylribose; note = backbone modification: 5'-phosphorothioate
  modified_base 14: mod_base = OTHER; mod_base = m5c; note = backbone modification: 5'-phosphorothioate; note = sugar modification: 2'-O-methoxyethylribose
  modified_base 15: mod_base = OTHER; note = sugar modification: lna; note = backbone modification: 5'-phosphorothioate
  modified_base 16: mod_base = OTHER; note = thymine; note = sugar modification: lna
tgttcttgtacttcat

SEQ ID NO: 1103 - RNA, 16 nt, synthetic construct
  source 1..16: mol_type = other RNA; note = Antisense oligonucleotide
  modified_base 1: mod_base = OTHER; note = backbone modification: 5'-phosphorothioate; note = thymine; note = sugar modification: lna
  modified_base 2: mod_base = OTHER; note = sugar modification: 2'-O-methoxyethylribose; note = backbone modification: 5'-phosphorothioate
  modified_base 3: mod_base = OTHER; note = sugar modification: 2'-O-methoxyethylribose; note = thymine; note = backbone modification: 5'-phosphorothioate
  modified_base 4: mod_base = OTHER; note = backbone modification: 5'-phosphorothioate; note = thymine; note = sugar modification: 2'-O-methoxyethylribose
  modified_base 5: mod_base = m5c; mod_base = OTHER; note = backbone modification: 5'-phosphorothioate; note = sugar modification: 2'-O-methoxyethylribose
  modified_base 6: mod_base = OTHER; note = sugar modification: 2'-O-methoxyethylribose; note = thymine; note = backbone modification: 5'-phosphorothioate
  modified_base 7: mod_base = OTHER; note = thymine; note = sugar modification: 2'-O-methoxyethylribose; note = backbone modification: 5'-phosphorothioate
  modified_base 8: mod_base = OTHER; note = backbone modification: 5'-phosphorothioate; note = sugar modification: 2'-O-methoxyethylribose
  modified_base 9: mod_base = OTHER; note = backbone modification: 5'-phosphorothioate; note = thymine; note = sugar modification: 2'-O-methoxyethylribose
  modified_base 10: mod_base = OTHER; note = backbone modification: 5'-phosphorothioate; note = sugar modification: lna
  modified_base 11: mod_base = m5c; mod_base = OTHER; note = backbone modification: 5'-phosphorothioate; note = sugar modification: 2'-O-methoxyethylribose
  modified_base 12: mod_base = OTHER; note = thymine; note = backbone modification: 5'-phosphorothioate; note = sugar modification: 2'-O-methoxyethylribose
  modified_base 13: mod_base = OTHER; note = sugar modification: 2'-O-methoxyethylribose; note = backbone modification: 5'-phosphorothioate; note = thymine
  modified_base 14: mod_base = m5c; mod_base = OTHER; note = backbone modification: 5'-phosphorothioate; note = sugar modification: 2'-O-methoxyethylribose
  modified_base 15: mod_base = OTHER; note = sugar modification: lna; note = backbone modification: 5'-phosphorothioate
  modified_base 16: mod_base = OTHER; note = thymine; note = sugar modification: lna
tgttcttgtacttcat

SEQ ID NO: 1104 - RNA, 16 nt, synthetic construct
  source 1..16: mol_type = other RNA; note = Antisense oligonucleotide
  modified_base 1: mod_base = OTHER; note = backbone modification: 5'-phosphorothioate; note = sugar modification: lna; note = thymine
  modified_base 2: mod_base = OTHER; note = backbone modification: 5'-phosphorothioate; note = sugar modification: 2'-O-methoxyethylribose
  modified_base 3: mod_base = OTHER; note = backbone modification: 5'-phosphorothioate; note = sugar modification: 2'-O-methoxyethylribose; note = thymine
  modified_base 4: mod_base = OTHER; note = sugar modification: 2'-O-methoxyethylribose; note = thymine; note = backbone modification: 5'-phosphorothioate
  modified_base 5: mod_base = OTHER; mod_base = m5c; note = sugar modification: 2'-O-methoxyethylribose; note = backbone modification: 5'-phosphorothioate
  modified_base 6: mod_base = OTHER; note = backbone modification: 5'-phosphorothioate; note = sugar modification: 2'-O-methoxyethylribose; note = thymine
  modified_base 7: mod_base = OTHER; note = backbone modification: 5'-phosphorothioate; note = sugar modification: 2'-O-methoxyethylribose; note = thymine
  modified_base 8: mod_base = OTHER; note = backbone modification: 5'-phosphorothioate; note = sugar modification: 2'-O-methoxyethylribose
  modified_base 9: mod_base = OTHER; note = thymine; note = sugar modification: 2'-O-methoxyethylribose; note = backbone modification: 5'-phosphorothioate
  modified_base 10: mod_base = OTHER; note = backbone modification: 5'-phosphorothioate; note = sugar modification: 2'-O-methoxyethylribose
  modified_base 11: mod_base = OTHER; mod_base = m5c; note = backbone modification: 5'-phosphorothioate; note = sugar modification: lna
  modified_base 12: mod_base = OTHER; note = thymine; note = sugar modification: 2'-O-methoxyethylribose; note = backbone modification: 5'-phosphorothioate
  modified_base 13: mod_base = OTHER; note = sugar modification: 2'-O-methoxyethylribose; note = thymine; note = backbone modification: 5'-phosphorothioate
  modified_base 14: mod_base = OTHER; mod_base = m5c; note = sugar modification: 2'-O-methoxyethylribose; note = backbone modification: 5'-phosphorothioate
  modified_base 15: mod_base = OTHER; note = sugar modification: lna; note = backbone modification: 5'-phosphorothioate
  modified_base 16: mod_base = OTHER; note = sugar modification: lna; note = thymine
tgttcttgtacttcat

SEQ ID NO: 1105 - RNA, 16 nt, synthetic construct
  source 1..16: mol_type = other RNA; note = Antisense oligonucleotide
  modified_base 1: mod_base = OTHER; note = thymine; note = backbone modification: 5'-phosphorothioate; note = sugar modification: lna
  modified_base 2: mod_base = OTHER; note = sugar modification: 2'-O-methoxyethylribose; note = backbone modification: 5'-phosphorothioate
  modified_base 3: mod_base = OTHER; note = thymine; note = backbone modification: 5'-phosphorothioate; note = sugar modification: 2'-O-methoxyethylribose
  modified_base 4: mod_base = OTHER; note = sugar modification: 2'-O-methoxyethylribose; note = thymine; note = backbone modification: 5'-phosphorothioate
  modified_base 5: mod_base = OTHER; mod_base = m5c; note = backbone modification: 5'-phosphorothioate; note = sugar modification: 2'-O-methoxyethylribose
  modified_base 6: mod_base = OTHER; note = backbone modification: 5'-phosphorothioate; note = thymine; note = sugar modification: 2'-O-methoxyethylribose
  modified_base 7: mod_base = OTHER; note = thymine; note = backbone modification: 5'-phosphorothioate; note = sugar modification: 2'-O-methoxyethylribose
  modified_base 8: mod_base = OTHER; note = backbone modification: 5'-phosphorothioate; note = sugar modification: 2'-O-methoxyethylribose
  modified_base 9: mod_base = OTHER; note = thymine; note = sugar modification: 2'-O-methoxyethylribose; note = backbone modification: 5'-phosphorothioate
  modified_base 10: mod_base = OTHER; note = backbone modification: 5'-phosphorothioate; note = sugar modification: 2'-O-methoxyethylribose
  modified_base 11: mod_base = m5c; mod_base = OTHER; note = sugar modification: 2'-O-methoxyethylribose; note = backbone modification: 5'-phosphorothioate
  modified_base 12: mod_base = OTHER; note = thymine; note = backbone modification: 5'-phosphorothioate; note = sugar modification: lna
  modified_base 13: mod_base = OTHER; note = backbone modification: 5'-phosphorothioate; note = thymine; note = sugar modification: 2'-O-methoxyethylribose
  modified_base 14: mod_base = OTHER; mod_base = m5c; note = sugar modification: 2'-O-methoxyethylribose; note = backbone modification: 5'-phosphorothioate
  modified_base 15: mod_base = OTHER; note = backbone modification: 5'-phosphorothioate; note = sugar modification: lna
  modified_base 16: mod_base = OTHER; note = thymine; note = sugar modification: lna
tgttcttgtacttcat

SEQ ID NO: 1106 - RNA, 16 nt, synthetic construct
  source 1..16: mol_type = other RNA; note = Antisense oligonucleotide
  modified_base 1: mod_base = OTHER; note = thymine; note = sugar modification: lna; note = backbone modification: 5'-phosphorothioate
  modified_base 2: mod_base = OTHER; note = sugar modification: 2'-O-methoxyethylribose; note = backbone modification: 5'-phosphorothioate
  modified_base 3: mod_base = OTHER; note = thymine; note = sugar modification: 2'-O-methoxyethylribose; note = backbone modification: 5'-phosphorothioate
  modified_base 4: mod_base = OTHER; note = thymine; note = sugar modification: 2'-O-methoxyethylribose; note = backbone modification: 5'-phosphorothioate
  modified_base 5: mod_base = m5c; mod_base = OTHER; note = sugar modification: 2'-O-methoxyethylribose; note = backbone modification: 5'-phosphorothioate
  modified_base 6: mod_base = OTHER; note = thymine; note = sugar modification: 2'-O-methoxyethylribose; note = backbone modification: 5'-phosphorothioate
  modified_base 7: mod_base = OTHER; note = thymine; note = backbone modification: 5'-phosphorothioate; note = sugar modification: 2'-O-methoxyethylribose
  modified_base 8: mod_base = OTHER; note = sugar modification: 2'-O-methoxyethylribose; note = backbone modification: 5'-phosphorothioate
  modified_base 9: mod_base = OTHER; note = sugar modification: 2'-O-methoxyethylribose; note = backbone modification: 5'-phosphorothioate; note = thymine
  modified_base 10: mod_base = OTHER; note = backbone modification: 5'-phosphorothioate; note = sugar modification: 2'-O-methoxyethylribose
  modified_base 11: mod_base = m5c; mod_base = OTHER; note = backbone modification: 5'-phosphorothioate; note = sugar modification: 2'-O-methoxyethylribose
  modified_base 12: mod_base = OTHER; note = sugar modification: 2'-O-methoxyethylribose; note = backbone modification: 5'-phosphorothioate; note = thymine
  modified_base 13: mod_base = OTHER; note = backbone modification: 5'-phosphorothioate; note = sugar modification: lna; note = thymine
  modified_base 14: mod_base = OTHER; mod_base = m5c; note = sugar modification: 2'-O-methoxyethylribose; note = backbone modification: 5'-phosphorothioate
  modified_base 15: mod_base = OTHER; note = backbone modification: 5'-phosphorothioate; note = sugar modification: lna
  modified_base 16: mod_base = OTHER; note = sugar modification: lna; note = thymine
tgttcttgtacttcat

SEQ ID NO: 1107 - RNA, 18 nt, synthetic construct
  source 1..18: mol_type = other RNA; note = Antisense oligonucleotide
  modified_base 1: mod_base = OTHER; mod_base = m5c; note = sugar modification: lna; note = backbone modification: 5'-phosphorothioate
  modified_base 2: mod_base = OTHER; note = thymine; note = backbone modification: 5'-phosphorothioate; note = sugar modification: lna
  modified_base 3: mod_base = OTHER; note = sugar modification: 2'-O-methoxyethylribose; note = backbone modification: 5'-phosphorothioate
  modified_base 4: mod_base = OTHER; note = sugar modification: 2'-O-methoxyethylribose; note = backbone modification: 5'-phosphorothioate
  modified_base 5: mod_base = OTHER; note = backbone modification: 5'-phosphorothioate; note = sugar modification: 2'-O-methoxyethylribose
  modified_base 6: mod_base = OTHER; note = thymine; note = sugar modification: 2'-O-methoxyethylribose; note = backbone modification: 5'-phosphorothioate
  modified_base 7: mod_base = OTHER; note = thymine; note = backbone modification: 5'-phosphorothioate; note = sugar modification: 2'-O-methoxyethylribose
  modified_base 8: mod_base = m5c; mod_base = OTHER; note = backbone modification: 5'-phosphorothioate; note = sugar modification: 2'-O-methoxyethylribose
  modified_base 9: mod_base = OTHER; note = backbone modification: 5'-phosphorothioate; note = thymine; note = sugar modification: 2'-O-methoxyethylribose
  modified_base 10: mod_base = OTHER; note = sugar modification: 2'-O-methoxyethylribose; note = thymine; note = backbone modification: 5'-phosphorothioate
  modified_base 11: mod_base = OTHER; note = thymine; note = sugar modification: 2'-O-methoxyethylribose; note = backbone modification: 5'-phosphorothioate
  modified_base 12: mod_base = m5c; mod_base = OTHER; note = sugar modification: 2'-O-methoxyethylribose; note = backbone modification: 5'-phosphorothioate
  modified_base 13: mod_base = OTHER; note = sugar modification: 2'-O-methoxyethylribose; note = backbone modification: 5'-phosphorothioate
  modified_base 14: mod_base = OTHER; note = backbone modification: 5'-phosphorothioate; note = sugar modification: 2'-O-methoxyethylribose
  modified_base 15: mod_base = OTHER; mod_base = m5c; note = backbone modification: 5'-phosphorothioate; note = sugar modification: 2'-O-methoxyethylribose
  modified_base 16: mod_base = OTHER; note = backbone modification: 5'-phosphorothioate; note = thymine; note = sugar modification: 2'-O-methoxyethylribose
  modified_base 17: mod_base = OTHER; note = sugar modification: lna; note = backbone modification: 5'-phosphorothioate
  modified_base 18: mod_base = OTHER; note = sugar modification: lna
ctgaattctttcaactag

SEQ ID NO: 1108 - RNA, 15 nt, synthetic construct
  source 1..15: mol_type = other RNA; note = Antisense oligonucleotide
  modified_base 1: mod_base = OTHER; note = thymine; note = sugar modification: 2'-O-methoxyethylribose; note = backbone modification: 5'-phosphorothioate
  modified_base 2: mod_base = OTHER; mod_base = m5c; note = backbone modification: 5'-phosphorothioate; note = sugar modification: 2'-O-methoxyethylribose
  modified_base 3: mod_base = OTHER; note = backbone modification: 5'-phosphorothioate; note = sugar modification: 2'-O-methoxyethylribose; note = thymine
  modified_base 4: mod_base = OTHER; note = backbone modification: 5'-phosphorothioate; note = sugar modification: 2'-O-methoxyethylribose
  modified_base 5: mod_base = OTHER; note = backbone modification: 5'-phosphorothioate; note = sugar modification: 2'-O-methoxyethylribose
  modified_base 6: mod_base = OTHER; note = backbone modification: 5'-phosphorothioate; note = sugar modification: 2'-O-methoxyethylribose
  modified_base 7: mod_base = OTHER; note = backbone modification: 5'-phosphorothioate; note = sugar modification: 2'-O-methoxyethylribose; note = thymine
  modified_base 8: mod_base = OTHER; note = thymine; note = sugar modification: 2'-O-methoxyethylribose; note = backbone modification: 5'-phosphorothioate
  modified_base 9: mod_base = OTHER; mod_base = m5c; note = sugar modification: 2'-O-methoxyethylribose; note = backbone modification: 5'-phosphorothioate
  modified_base 10: mod_base = OTHER; note = sugar modification: 2'-O-methoxyethylribose; note = thymine; note = backbone modification: 5'-phosphorothioate
  modified_base 11: mod_base = OTHER; note = sugar modification: 2'-O-methoxyethylribose; note = thymine; note = backbone modification: 5'-phosphorothioate
  modified_base 12: mod_base = OTHER; note = sugar modification: 2'-O-methoxyethylribose; note = thymine; note = backbone modification: 5'-phosphorothioate
  modified_base 13: mod_base = m5c; mod_base = OTHER; note = sugar modification: 2'-O-methoxyethylribose; note = backbone modification: 5'-phosphorothioate
  modified_base 14: mod_base = OTHER; note = backbone modification: 5'-phosphorothioate; note = sugar modification: 2'-O-methoxyethylribose
  modified_base 15: mod_base = OTHER; note = sugar modification: 2'-O-methoxyethylribose
tctgaattctttcaa

SEQ ID NO: 1109 - RNA, 15 nt, synthetic construct
  source 1..15: mol_type = other RNA; note = Antisense oligonucleotide
  modified_base 1: mod_base = OTHER; mod_base = m5c; note = backbone modification: 5'-phosphorothioate; note = sugar modification: 2'-O-methoxyethylribose
  modified_base 2: mod_base = OTHER; note = thymine; note = sugar modification: 2'-O-methoxyethylribose; note = backbone modification: 5'-phosphorothioate
  modified_base 3: mod_base = OTHER; note = sugar modification: 2'-O-methoxyethylribose; note = backbone modification: 5'-phosphorothioate
  modified_base 4: mod_base = OTHER; note = backbone modification: 5'-phosphorothioate; note = sugar modification: 2'-O-methoxyethylribose
  modified_base 5: mod_base = OTHER; note = backbone modification: 5'-phosphorothioate; note = sugar modification: 2'-O-methoxyethylribose
  modified_base 6: mod_base = OTHER; note = thymine; note = sugar modification: 2'-O-methoxyethylribose; note = backbone modification: 5'-phosphorothioate
  modified_base 7: mod_base = OTHER; note = backbone modification: 5'-phosphorothioate; note = thymine; note = sugar modification: 2'-O-methoxyethylribose
  modified_base 8: mod_base = m5c; mod_base = OTHER; note = sugar modification: 2'-O-methoxyethylribose; note = backbone modification: 5'-phosphorothioate
  modified_base 9: mod_base = OTHER; note = thymine; note = backbone modification: 5'-phosphorothioate; note = sugar modification: 2'-O-methoxyethylribose
  modified_base 10: mod_base = OTHER; note = sugar modification: 2'-O-methoxyethylribose; note = thymine; note = backbone modification: 5'-phosphorothioate
  modified_base 11: mod_base = OTHER; note = thymine; note = backbone modification: 5'-phosphorothioate; note = sugar modification: 2'-O-methoxyethylribose
  modified_base 12: mod_base = OTHER; mod_base = m5c; note = sugar modification: 2'-O-methoxyethylribose; note = backbone modification: 5'-phosphorothioate
  modified_base 13: mod_base = OTHER; note = backbone modification: 5'-phosphorothioate; note = sugar modification: 2'-O-methoxyethylribose
  modified_base 14: mod_base = OTHER; note = backbone modification: 5'-phosphorothioate; note = sugar modification: 2'-O-methoxyethylribose
  modified_base 15: mod_base = m5c; mod_base = OTHER; note = sugar modification: 2'-O-methoxyethylribose
ctgaattctttcaac

SEQ ID NO: 1110 - RNA, 15 nt, synthetic construct
  source 1..15: mol_type = other RNA; note = Antisense oligonucleotide
  modified_base 1: mod_base = OTHER; note = backbone modification: 5'-phosphorothioate; note = thymine; note = sugar modification: 2'-O-methoxyethylribose
  modified_base 2: mod_base = OTHER; note = backbone modification: 5'-phosphorothioate; note = sugar modification: 2'-O-methoxyethylribose
  modified_base 3: mod_base = OTHER; note = sugar modification: 2'-O-methoxyethylribose; note = backbone modification: 5'-phosphorothioate
  modified_base 4: mod_base = OTHER; note = backbone modification: 5'-phosphorothioate; note = sugar modification: 2'-O-methoxyethylribose
  modified_base 5: mod_base = OTHER; note = thymine; note = backbone modification: 5'-phosphorothioate; note = sugar modification: 2'-O-methoxyethylribose
  modified_base 6: mod_base = OTHER; note = backbone modification: 5'-phosphorothioate; note = thymine; note = sugar modification: 2'-O-methoxyethylribose
  modified_base 7: mod_base = OTHER; mod_base = m5c; note = backbone modification: 5'-phosphorothioate; note = sugar modification: 2'-O-methoxyethylribose
  modified_base 8: mod_base = OTHER; note = thymine; note = backbone modification: 5'-phosphorothioate; note = sugar modification: 2'-O-methoxyethylribose
  modified_base 9: mod_base = OTHER; note = thymine; note = sugar modification: 2'-O-methoxyethylribose; note = backbone modification: 5'-phosphorothioate
  modified_base 10: mod_base = OTHER; note = backbone modification: 5'-phosphorothioate; note = sugar modification: 2'-O-methoxyethylribose; note = thymine
  modified_base 11: mod_base = m5c; mod_base = OTHER; note = sugar modification: 2'-O-methoxyethylribose; note = backbone modification: 5'-phosphorothioate
  modified_base 12: mod_base = OTHER; note = sugar modification: 2'-O-methoxyethylribose; note = backbone modification: 5'-phosphorothioate
  modified_base 13: mod_base = OTHER; note = sugar modification: 2'-O-methoxyethylribose; note = backbone modification: 5'-phosphorothioate
  modified_base 14: mod_base = OTHER; mod_base = m5c; note = backbone modification: 5'-phosphorothioate; note = sugar modification: 2'-O-methoxyethylribose
  modified_base 15: mod_base = OTHER; note = sugar modification: 2'-O-methoxyethylribose; note = thymine
tgaattctttcaact

SEQ ID NO: 1111 - RNA, 15 nt, synthetic construct
  source 1..15: mol_type = other RNA; note = Antisense oligonucleotide
  modified_base 1: mod_base = OTHER; note = backbone modification: 5'-phosphorothioate; note = sugar modification: 2'-O-methoxyethylribose
  modified_base 2: mod_base = OTHER; note = sugar modification: 2'-O-methoxyethylribose; note = backbone modification: 5'-phosphorothioate
  modified_base 3: mod_base = OTHER; note = thymine; note = sugar modification: 2'-O-methoxyethylribose; note = backbone modification: 5'-phosphorothioate
  modified_base 4: mod_base = OTHER; note = sugar modification: 2'-O-methoxyethylribose; note = backbone modification: 5'-phosphorothioate; note = thymine
  modified_base 5: mod_base = OTHER; mod_base = m5c; note = backbone modification: 5'-phosphorothioate; note = sugar modification: 2'-O-methoxyethylribose
  modified_base 6: mod_base = OTHER; note = sugar modification: 2'-O-methoxyethylribose; note = thymine; note = backbone modification: 5'-phosphorothioate
  modified_base 7: mod_base = OTHER; note = sugar modification: 2'-O-methoxyethylribose; note = backbone modification: 5'-phosphorothioate; note = thymine
  modified_base 8: mod_base = OTHER; note = sugar modification: 2'-O-methoxyethylribose; note = backbone modification: 5'-phosphorothioate; note = thymine
  modified_base 9: mod_base = OTHER; mod_base = m5c; note = backbone modification: 5'-phosphorothioate; note = sugar modification: 2'-O-methoxyethylribose
  modified_base 10: mod_base = OTHER; note = sugar modification: 2'-O-methoxyethylribose; note = backbone modification: 5'-phosphorothioate
  modified_base 11: mod_base = OTHER; note = sugar modification: 2'-O-methoxyethylribose; note = backbone modification: 5'-phosphorothioate
  modified_base 12: mod_base = OTHER; mod_base = m5c; note = sugar modification: 2'-O-methoxyethylribose; note = backbone modification: 5'-phosphorothioate
  modified_base 13: mod_base = OTHER; note = thymine; note = sugar modification: 2'-O-methoxyethylribose; note = backbone modification: 5'-phosphorothioate
  modified_base 14: mod_base = OTHER; note = backbone modification: 5'-phosphorothioate; note = sugar modification: 2'-O-methoxyethylribose
  modified_base 15: mod_base = OTHER; note = sugar modification: 2'-O-methoxyethylribose
aattctttcaactag

SEQ ID NO: 1112 - RNA, 15 nt, synthetic construct
  source 1..15: mol_type = other RNA; note = Antisense oligonucleotide
  modified_base 1: mod_base = OTHER; note = backbone modification: 5'-phosphorothioate; note = sugar modification: 2'-O-methoxyethylribose
  modified_base 2: mod_base = OTHER; note = backbone modification: 5'-phosphorothioate; note = sugar modification: 2'-O-methoxyethylribose; note = thymine
  modified_base 3: mod_base = OTHER; note = backbone modification: 5'-phosphorothioate; note = thymine; note = sugar modification: 2'-O-methoxyethylribose
  modified_base 4: mod_base = m5c; mod_base = OTHER; note = sugar modification: 2'-O-methoxyethylribose; note = backbone modification: 5'-phosphorothioate
  modified_base 5: mod_base = OTHER; note = backbone modification: 5'-phosphorothioate; note = sugar modification: 2'-O-methoxyethylribose; note = thymine
  modified_base 6: mod_base = OTHER; note = thymine; note = backbone modification: 5'-phosphorothioate; note = sugar modification: 2'-O-methoxyethylribose
  modified_base 7: mod_base = OTHER; note = backbone modification: 5'-phosphorothioate; note = thymine; note = sugar modification: 2'-O-methoxyethylribose
  modified_base 8: mod_base = m5c; mod_base = OTHER; note = sugar modification: 2'-O-methoxyethylribose; note = backbone modification: 5'-phosphorothioate
  modified_base 9: mod_base = OTHER; note = sugar modification: 2'-O-methoxyethylribose; note = backbone modification: 5'-phosphorothioate
  modified_base 10: mod_base = OTHER; note = backbone modification: 5'-phosphorothioate; note = sugar modification: 2'-O-methoxyethylribose
  modified_base 11: mod_base = m5c; mod_base = OTHER; note = sugar modification: 2'-O-methoxyethylribose; note = backbone modification: 5'-phosphorothioate
  modified_base 12: mod_base = OTHER; note = backbone modification: 5'-phosphorothioate; note = thymine; note = sugar modification: 2'-O-methoxyethylribose
  modified_base 13: mod_base = OTHER; note = sugar modification: 2'-O-methoxyethylribose; note = backbone modification: 5'-phosphorothioate
  modified_base 14: mod_base = OTHER; note = backbone modification: 5'-phosphorothioate; note = sugar modification: 2'-O-methoxyethylribose
  modified_base 15: mod_base = OTHER; note = sugar modification: 2'-O-methoxyethylribose
attctttcaactaga

SEQ ID NO: 1113 - RNA, 17 nt, synthetic construct
  source 1..17: mol_type = other RNA; note = Antisense oligonucleotide
  modified_base 1: mod_base = OTHER; note = sugar modification: 2'-O-methoxyethylribose; note = thymine; note = backbone modification: 5'-phosphorothioate
  modified_base 2: mod_base = OTHER; mod_base = m5c; note = sugar modification: 2'-O-methoxyethylribose; note = backbone modification: 5'-phosphorothioate
  modified_base 3: mod_base = OTHER; note = backbone modification: 5'-phosphorothioate; note = sugar modification: 2'-O-methoxyethylribose; note = thymine
  modified_base 4: mod_base = OTHER; note = backbone modification: 5'-phosphorothioate; note = sugar modification: 2'-O-methoxyethylribose
  modified_base 5: mod_base = OTHER; note = sugar modification: 2'-O-methoxyethylribose; note = backbone modification: 5'-phosphorothioate
  modified_base 6: mod_base = OTHER; note = backbone modification: 5'-phosphorothioate; note = sugar modification: 2'-O-methoxyethylribose
  modified_base 7: mod_base = OTHER; note = sugar modification: 2'-O-methoxyethylribose; note = thymine; note = backbone modification: 5'-phosphorothioate
  modified_base 8: mod_base = OTHER; note = backbone modification: 5'-phosphorothioate; note = sugar modification: 2'-O-methoxyethylribose; note = thymine
  modified_base 9: mod_base = OTHER; mod_base = m5c; note = sugar modification: 2'-O-methoxyethylribose; note = backbone modification: 5'-phosphorothioate
  modified_base 10: mod_base = OTHER; note = backbone modification: 5'-phosphorothioate; note = sugar modification: 2'-O-methoxyethylribose; note = thymine
  modified_base 11: mod_base = OTHER; note = backbone modification: 5'-phosphorothioate; note = thymine; note = sugar modification: 2'-O-methoxyethylribose
  modified_base 12: mod_base = OTHER; note = sugar modification: 2'-O-methoxyethylribose; note = thymine; note = backbone modification: 5'-phosphorothioate
  modified_base 13: mod_base = m5c; mod_base = OTHER; note = backbone modification: 5'-phosphorothioate; note = sugar modification: 2'-O-methoxyethylribose
  modified_base 14: mod_base = OTHER; note = backbone modification: 5'-phosphorothioate; note = sugar modification: 2'-O-methoxyethylribose
  modified_base 15: mod_base = OTHER; note = backbone modification: 5'-phosphorothioate; note = sugar modification: 2'-O-methoxyethylribose
  modified_base 16: mod_base = OTHER; mod_base = m5c; note = backbone modification: 5'-phosphorothioate; note = sugar modification: 2'-O-methoxyethylribose
  modified_base 17: mod_base = OTHER; note = sugar modification: 2'-O-methoxyethylribose; note = thymine
tctgaattctttcaact

SEQ ID NO: 1114 - RNA, 17 nt, synthetic construct
  source 1..17: mol_type = other RNA; note = Antisense oligonucleotide
  modified_base 1: mod_base = m5c; mod_base = OTHER; note = backbone modification: 5'-phosphorothioate; note = sugar modification: 2'-O-methoxyethylribose
  modified_base 2: mod_base = OTHER; note = sugar modification: 2'-O-methoxyethylribose; note = backbone modification: 5'-phosphorothioate; note = thymine
  modified_base 3: mod_base = OTHER; note = backbone modification: 5'-phosphorothioate; note = sugar modification: 2'-O-methoxyethylribose
  modified_base 4: mod_base = OTHER; note = backbone modification: 5'-phosphorothioate; note = sugar modification: 2'-O-methoxyethylribose
  modified_base 5: mod_base = OTHER; note = sugar modification: 2'-O-methoxyethylribose; note = backbone modification: 5'-phosphorothioate
  modified_base 6: mod_base = OTHER; note = sugar modification: 2'-O-methoxyethylribose; note = backbone modification: 5'-phosphorothioate; note = thymine
  modified_base 7: mod_base = OTHER; note = sugar modification: 2'-O-methoxyethylribose; note = backbone modification: 5'-phosphorothioate; note = thymine
  modified_base 8: mod_base = m5c; mod_base = OTHER; note = sugar modification: 2'-O-methoxyethylribose; note = backbone modification: 5'-phosphorothioate
  modified_base 9: mod_base = OTHER; note = sugar modification: 2'-O-methoxyethylribose; note = backbone modification: 5'-phosphorothioate; note = thymine
  modified_base 10: mod_base = OTHER; note = sugar modification: 2'-O-methoxyethylribose; note = thymine; note = backbone modification: 5'-phosphorothioate
  modified_base 11: mod_base = OTHER; note = backbone modification: 5'-phosphorothioate; note = thymine; note = sugar modification: 2'-O-methoxyethylribose
  modified_base 12: mod_base = m5c; mod_base = OTHER; note = backbone modification: 5'-phosphorothioate; note = sugar modification: 2'-O-methoxyethylribose
  modified_base 13: mod_base = OTHER; note = sugar modification: 2'-O-methoxyethylribose; note = backbone modification: 5'-phosphorothioate
  modified_base 14: mod_base = OTHER; note = sugar modification: 2'-O-methoxyethylribose; note = backbone modification: 5'-phosphorothioate
  modified_base 15: mod_base = OTHER; mod_base = m5c; note = sugar modification: 2'-O-methoxyethylribose; note = backbone modification: 5'-phosphorothioate
  modified_base 16: mod_base = OTHER; note = backbone modification: 5'-phosphorothioate; note = thymine; note = sugar modification: 2'-O-methoxyethylribose
  modified_base 17: mod_base = OTHER; note = sugar modification: 2'-O-methoxyethylribose
ctgaattctttcaacta

SEQ ID NO: 1115 - RNA, 17 nt, synthetic construct
  source 1..17: mol_type = other RNA; note = Antisense oligonucleotide
  modified_base 1: mod_base = OTHER; note = thymine; note = backbone modification: 5'-phosphorothioate; note = sugar modification: 2'-O-methoxyethylribose
  modified_base 2: mod_base = OTHER; note = backbone modification: 5'-phosphorothioate; note = sugar modification: 2'-O-methoxyethylribose
  modified_base 3: mod_base = OTHER; note = backbone modification: 5'-phosphorothioate; note = sugar modification: 2'-O-methoxyethylribose
  modified_base 4: mod_base = OTHER; note = backbone modification: 5'-phosphorothioate; note = sugar modification: 2'-O-methoxyethylribose
  modified_base 5: mod_base = OTHER; note = sugar modification: 2'-O-methoxyethylribose; note = thymine; note = backbone modification: 5'-phosphorothioate
  modified_base 6: mod_base = OTHER; note = sugar modification: 2'-O-methoxyethylribose; note = backbone modification: 5'-phosphorothioate; note = thymine
  modified_base 7: mod_base = m5c; mod_base = OTHER; note = backbone modification: 5'-phosphorothioate; note = sugar modification: 2'-O-methoxyethylribose
  modified_base 8: mod_base = OTHER; note = sugar modification: 2'-O-methoxyethylribose; note = thymine; note = backbone modification: 5'-phosphorothioate
  modified_base 9: mod_base = OTHER; note = backbone modification: 5'-phosphorothioate; note = sugar modification: 2'-O-methoxyethylribose; note = thymine
  modified_base 10: mod_base = OTHER; note = sugar modification: 2'-O-methoxyethylribose; note = backbone modification: 5'-phosphorothioate; note = thymine
  modified_base 11: mod_base = OTHER; mod_base = m5c; note = backbone modification: 5'-phosphorothioate; note = sugar modification: 2'-O-methoxyethylribose
  modified_base 12: mod_base = OTHER; note = backbone modification: 5'-phosphorothioate; note = sugar modification: 2'-O-methoxyethylribose
  modified_base 13: mod_base = OTHER; note = backbone modification: 5'-phosphorothioate; note = sugar modification: 2'-O-methoxyethylribose
  modified_base 14: mod_base = OTHER; mod_base = m5c; note = backbone modification: 5'-phosphorothioate; note = sugar modification: 2'-O-methoxyethylribose
  modified_base 15: mod_base = OTHER; note = backbone modification: 5'-phosphorothioate; note = thymine; note = sugar modification: 2'-O-methoxyethylribose
  modified_base 16: mod_base = OTHER; note = sugar modification: 2'-O-methoxyethylribose; note = backbone modification: 5'-phosphorothioate
  modified_base 17: mod_base = OTHER; note = sugar modification: 2'-O-methoxyethylribose
tgaattctttcaactag

SEQ ID NO: 1116 - RNA, 17 nt, synthetic construct
  source 1..17: mol_type = other RNA; note = Antisense oligonucleotide
  modified_base 1: mod_base = OTHER; note = sugar modification: 2'-O-methoxyethylribose; note = backbone modification: 5'-phosphorothioate
  modified_base 2: mod_base = OTHER; note = sugar modification: 2'-O-methoxyethylribose; note = backbone modification: 5'-phosphorothioate
  modified_base 3: mod_base = OTHER; note = backbone modification: 5'-phosphorothioate; note = sugar modification: 2'-O-methoxyethylribose
  modified_base 4: mod_base = OTHER; note = thymine; note = backbone modification: 5'-phosphorothioate; note = sugar modification: 2'-O-methoxyethylribose
  modified_base 5: mod_base = OTHER; note = backbone modification: 5'-phosphorothioate; note = thymine; note = sugar modification: 2'-O-methoxyethylribose
  modified_base 6: mod_base = m5c; mod_base = OTHER; note = backbone modification: 5'-phosphorothioate; note = sugar modification: 2'-O-methoxyethylribose
  modified_base 7: mod_base = OTHER; note = backbone modification: 5'-phosphorothioate; note = sugar modification: 2'-O-methoxyethylribose; note = thymine
  modified_base 8: mod_base = OTHER; note = backbone modification: 5'-phosphorothioate; note = thymine; note = sugar modification: 2'-O-methoxyethylribose
  modified_base 9: mod_base = OTHER; note = backbone modification: 5'-phosphorothioate; note = thymine; note = sugar modification: 2'-O-methoxyethylribose
  modified_base 10: mod_base = m5c; mod_base = OTHER; note = backbone modification: 5'-phosphorothioate; note = sugar modification: 2'-O-methoxyethylribose
  modified_base 11: mod_base = OTHER; note = sugar modification: 2'-O-methoxyethylribose; note = backbone modification: 5'-phosphorothioate
  modified_base 12: mod_base = OTHER; note = sugar modification: 2'-O-methoxyethylribose; note = backbone modification: 5'-phosphorothioate
  modified_base 13: mod_base = m5c; mod_base = OTHER; note = sugar modification: 2'-O-methoxyethylribose; note = backbone modification: 5'-phosphorothioate
  modified_base 14: mod_base = OTHER; note = sugar modification: 2'-O-methoxyethylribose; note = thymine; note = backbone modification: 5'-phosphorothioate
  modified_base 15: mod_base = OTHER; note = backbone modification: 5'-phosphorothioate; note = sugar modification: 2'-O-methoxyethylribose
  modified_base 16: mod_base = OTHER; note = sugar modification: 2'-O-methoxyethylribose; note = backbone modification: 5'-phosphorothioate
  modified_base 17: mod_base = OTHER; note = sugar modification: 2'-O-methoxyethylribose
gaattctttcaactaga

SEQ ID NO: 1117 - RNA, 20 nt, synthetic construct
  source 1..20: mol_type = other RNA; note = Antisense oligonucleotide
  modified_base 1: mod_base = OTHER; note = thymine; note = sugar modification: 2'-O-methoxyethylribose; note = backbone modification: 5'-phosphorothioate
  modified_base 2: mod_base = OTHER; mod_base = m5c; note = sugar modification: 2'-O-methoxyethylribose; note = backbone modification: 5'-phosphorothioate
  modified_base 3: mod_base = OTHER; note = backbone modification: 5'-phosphorothioate; note = sugar modification: 2'-O-methoxyethylribose; note = thymine
  modified_base 4: mod_base = OTHER; note = backbone modification: 5'-phosphorothioate; note = sugar modification: 2'-O-methoxyethylribose
  modified_base 5: mod_base = OTHER; note = sugar modification: 2'-O-methoxyethylribose; note = backbone modification: 5'-phosphorothioate
  modified_base 6: mod_base = OTHER; note = sugar modification: 2'-O-methoxyethylribose; note = backbone modification: 5'-phosphorothioate
  modified_base 7: mod_base = OTHER; note = backbone modification: 5'-phosphorothioate; note = sugar modification: 2'-O-methoxyethylribose; note = thymine
  modified_base 8: mod_base = OTHER; note = sugar modification: 2'-O-methoxyethylribose; note = thymine; note = backbone modification: 5'-phosphorothioate
  modified_base 9: mod_base = m5c; mod_base = OTHER; note = sugar modification: 2'-O-methoxyethylribose; note = backbone modification: 5'-phosphorothioate
  modified_base 10: mod_base = OTHER; note = sugar modification: 2'-O-methoxyethylribose; note = backbone modification: 5'-phosphorothioate; note = thymine
  modified_base 11: mod_base = OTHER; note = backbone modification: 5'-phosphorothioate; note = sugar modification: 2'-O-methoxyethylribose; note = thymine
  modified_base 12: mod_base = OTHER; note = thymine; note = backbone modification: 5'-phosphorothioate; note = sugar modification: 2'-O-methoxyethylribose
  modified_base 13: mod_base = m5c; mod_base = OTHER; note = sugar modification: 2'-O-methoxyethylribose; note = backbone modification: 5'-phosphorothioate
  modified_base 14: mod_base = OTHER; note = backbone modification: 5'-phosphorothioate; note = sugar modification: 2'-O-methoxyethylribose
  modified_base 15: mod_base = OTHER; note = backbone modification: 5'-phosphorothioate; note = sugar modification: 2'-O-methoxyethylribose
  modified_base 16: mod_base = OTHER; mod_base = m5c; note = sugar modification: 2'-O-methoxyethylribose; note = backbone modification: 5'-phosphorothioate
  modified_base 17: mod_base = OTHER; note = sugar modification: 2'-O-methoxyethylribose; note = thymine; note = backbone modification: 5'-phosphorothioate
  modified_base 18: mod_base = OTHER; note = backbone modification: 5'-phosphorothioate; note = sugar modification: 2'-O-methoxyethylribose
  modified_base 19: mod_base = OTHER; note = sugar modification: 2'-O-methoxyethylribose; note = backbone modification: 5'-phosphorothioate
  modified_base 20: mod_base = OTHER; note = sugar modification: 2'-O-methoxyethylribose
tctgaattctttcaactaga

SEQ ID NO: 1118 - RNA, 19 nt, synthetic construct
  source 1..19: mol_type = other RNA; note = Antisense oligonucleotide
  modified_base 1: mod_base = OTHER; note = backbone modification: 5'-phosphorothioate; note = thymine; note = sugar modification: 2'-O-methoxyethylribose
  modified_base 2: mod_base = OTHER; mod_base = m5c; note = backbone modification: 5'-phosphorothioate; note = sugar modification: 2'-O-methoxyethylribose
  modified_base 3: mod_base = OTHER; note = sugar modification: 2'-O-methoxyethylribose; note = backbone modification: 5'-phosphorothioate; note = thymine
  modified_base 4: mod_base = OTHER; note = backbone modification: 5'-phosphorothioate; note = sugar modification: 2'-O-methoxyethylribose
  modified_base 5: mod_base = OTHER; note = backbone modification: 5'-phosphorothioate; note = sugar modification: 2'-O-methoxyethylribose
  modified_base 6: mod_base = OTHER; note = backbone modification: 5'-phosphorothioate; note = sugar modification: 2'-O-methoxyethylribose
  modified_base 7: mod_base = OTHER; note = thymine; note = sugar modification: 2'-O-methoxyethylribose; note = backbone modification: 5'-phosphorothioate
  modified_base 8: mod_base = OTHER; note = backbone modification: 5'-phosphorothioate; note = thymine; note = sugar modification: 2'-O-methoxyethylribose
  modified_base 9: mod_base = m5c; mod_base = OTHER; note = backbone modification: 5'-phosphorothioate; note = sugar modification: 2'-O-methoxyethylribose
  modified_base 10: mod_base = OTHER; note = thymine; note = sugar modification: 2'-O-methoxyethylribose; note = backbone modification: 5'-phosphorothioate
  modified_base 11: mod_base = OTHER; note = thymine; note = sugar modification: 2'-O-methoxyethylribose; note = backbone modification: 5'-phosphorothioate
  modified_base 12: mod_base = OTHER; note = sugar modification: 2'-O-methoxyethylribose; note = thymine; note = backbone modification: 5'-phosphorothioate
  modified_base 13: mod_base = m5c; mod_base = OTHER; note = sugar modification: 2'-O-methoxyethylribose; note = backbone modification: 5'-phosphorothioate
  modified_base 14: mod_base = OTHER; note = backbone modification: 5'-phosphorothioate; note = sugar modification: 2'-O-methoxyethylribose
  modified_base 15: mod_base = OTHER; note = sugar modification: 2'-O-methoxyethylribose; note = backbone modification: 5'-phosphorothioate
  modified_base 16: mod_base = OTHER; mod_base = m5c; note = sugar modification: 2'-O-methoxyethylribose; note = backbone modification: 5'-phosphorothioate
  modified_base 17: mod_base = OTHER; note = backbone modification: 5'-phosphorothioate; note = thymine; note = sugar modification: 2'-O-methoxyethylribose
  modified_base 18: mod_base = OTHER; note = sugar modification: 2'-O-methoxyethylribose; note = backbone modification: 5'-phosphorothioate
  modified_base 19: mod_base = OTHER; note = sugar modification: 2'-O-methoxyethylribose
tctgaattctttcaactag

SEQ ID NO: 1119 - RNA, 19 nt, synthetic construct
  source 1..19: mol_type = other RNA; note = Antisense oligonucleotide
  modified_base 1: mod_base = OTHER; mod_base = m5c; note = sugar modification: 2'-O-methoxyethylribose; note = backbone modification: 5'-phosphorothioate
  modified_base 2: mod_base = OTHER; note = sugar modification: 2'-O-methoxyethylribose; note = thymine; note = backbone modification: 5'-phosphorothioate
  modified_base 3: mod_base = OTHER; note = backbone modification: 5'-phosphorothioate; note = sugar modification: 2'-O-methoxyethylribose
  modified_base 4: mod_base = OTHER; note = backbone modification: 5'-phosphorothioate; note = sugar modification: 2'-O-methoxyethylribose
  modified_base 5: mod_base = OTHER; note = backbone modification: 5'-phosphorothioate; note = sugar modification: 2'-O-methoxyethylribose
  modified_base 6: mod_base = OTHER; note = backbone modification: 5'-phosphorothioate; note = sugar modification: 2'-O-methoxyethylribose; note = thymine
  modified_base 7: mod_base = OTHER; note = thymine; note = sugar modification: 2'-O-methoxyethylribose; note = backbone modification: 5'-phosphorothioate
  modified_base 8: mod_base = OTHER; mod_base = m5c; note = backbone modification: 5'-phosphorothioate; note = sugar modification: 2'-O-methoxyethylribose
  modified_base 9: mod_base = OTHER; note = sugar modification: 2'-O-methoxyethylribose; note = thymine; note = backbone modification: 5'-phosphorothioate
  modified_base 10: mod_base = OTHER; note = sugar modification: 2'-O-methoxyethylribose; note = thymine; note = backbone modification: 5'-phosphorothioate
  modified_base 11: mod_base = OTHER; note = backbone modification: 5'-phosphorothioate; note = thymine; note = sugar modification: 2'-O-methoxyethylribose
  modified_base 12: mod_base = OTHER; mod_base = m5c; note = backbone modification: 5'-phosphorothioate; note = sugar modification: 2'-O-methoxyethylribose
  modified_base 13: mod_base = OTHER; note = sugar modification: 2'-O-methoxyethylribose; note = backbone modification: 5'-phosphorothioate
  modified_base 14: mod_base = OTHER; note = sugar modification: 2'-O-methoxyethylribose; note = backbone modification: 5'-phosphorothioate
  modified_base 15: mod_base = m5c; mod_base = OTHER; note = backbone modification: 5'-phosphorothioate; note = sugar modification: 2'-O-methoxyethylribose
  modified_base 16: mod_base = OTHER; note = thymine; note = sugar modification: 2'-O-methoxyethylribose; note = backbone modification: 5'-phosphorothioate
  modified_base 17: mod_base = OTHER; note = backbone modification: 5'-phosphorothioate; note = sugar modification: 2'-O-methoxyethylribose
  modified_base 18: mod_base = OTHER; note = sugar modification: 2'-O-methoxyethylribose; note = backbone modification: 5'-phosphorothioate
  modified_base 19: mod_base = OTHER; note = sugar modification: 2'-O-methoxyethylribose
ctgaattctttcaactaga

SEQ ID NO: 1120 - RNA, 20 nt, synthetic construct
  source 1..20: mol_type = other RNA; note = Antisense oligonucleotide
  modified_base 1: mod_base = OTHER; mod_base = m5c; note = backbone modification: 5'-phosphorothioate; note = sugar modification: 2'-O-methoxyethylribose
  modified_base 2: mod_base = OTHER; note = thymine; note = sugar modification: 2'-O-methoxyethylribose; note = backbone modification: 5'-phosphorothioate
  modified_base 3: mod_base = OTHER; note = backbone modification: 5'-phosphorothioate; note = sugar modification: 2'-O-methoxyethylribose
  modified_base 4: mod_base = OTHER; note = backbone modification: 5'-phosphorothioate; note = sugar modification: 2'-O-methoxyethylribose
  modified_base 5: mod_base = OTHER; note = backbone modification: 5'-phosphorothioate; note = sugar modification: 2'-O-methoxyethylribose
  modified_base 6: mod_base = OTHER; note = backbone modification: 5'-phosphorothioate; note = thymine; note = sugar modification: 2'-O-methoxyethylribose
  modified_base 7: mod_base = OTHER; note = backbone modification: 5'-phosphorothioate; note = sugar modification: 2'-O-methoxyethylribose; note = thymine
  modified_base 8: mod_base = OTHER; mod_base = m5c; note = sugar modification: 2'-O-methoxyethylribose; note = backbone modification: 5'-phosphorothioate
  modified_base 9: mod_base = OTHER; note = sugar modification: 2'-O-methoxyethylribose; note = thymine; note = backbone modification: 5'-phosphorothioate
  modified_base 10: mod_base = OTHER; note = sugar modification: 2'-O-methoxyethylribose; note = backbone modification: 5'-phosphorothioate; note = thymine
  modified_base 11: mod_base = OTHER; note = thymine; note = backbone modification: 5'-phosphorothioate; note = sugar modification: 2'-O-methoxyethylribose
  modified_base 12: mod_base = m5c; mod_base = OTHER; note = backbone modification: 5'-phosphorothioate; note = sugar modification: 2'-O-methoxyethylribose
  modified_base 13: mod_base = OTHER; note = backbone modification: 5'-phosphorothioate; note = sugar modification: 2'-O-methoxyethylribose
  modified_base 14: mod_base = OTHER; note = sugar modification: 2'-O-methoxyethylribose; note = backbone modification: 5'-phosphorothioate
  modified_base 15: mod_base = OTHER; mod_base = m5c; note = sugar modification: 2'-O-methoxyethylribose; note = backbone modification: 5'-phosphorothioate
  modified_base 16: mod_base = OTHER; note = sugar modification: 2'-O-methoxyethylribose; note = backbone modification: 5'-phosphorothioate; note = thymine
  modified_base 17: mod_base = OTHER; note = backbone modification: 5'-phosphorothioate; note = sugar modification: 2'-O-methoxyethylribose
  modified_base 18: mod_base = OTHER; note = backbone modification: 5'-phosphorothioate; note = sugar modification: 2'-O-methoxyethylribose
  modified_base 19: mod_base = OTHER; note = backbone modification: 5'-phosphorothioate; note = sugar modification: 2'-O-methoxyethylribose
  modified_base 20: mod_base = OTHER; note = sugar modification: 2'-O-methoxyethylribose
ctgaattctttcaactagaa

SEQ ID NO: 1121 - RNA, 20 nt, synthetic construct
  source 1..20: mol_type = other RNA; note = Antisense oligonucleotide
  modified_base 1: mod_base = OTHER; note = thymine; note = backbone modification: 5'-phosphorothioate; note = sugar modification: 2'-O-methoxyethylribose
  modified_base 2: mod_base = OTHER; note = thymine; note = backbone modification: 5'-phosphorothioate; note = sugar modification: 2'-O-methoxyethylribose
  modified_base 3: mod_base = OTHER; mod_base = m5c; note = backbone modification: 5'-phosphorothioate; note = sugar modification: 2'-O-methoxyethylribose
  modified_base 4: mod_base = OTHER; note = thymine; note = backbone modification: 5'-phosphorothioate; note = sugar modification: 2'-O-methoxyethylribose
  modified_base 5: mod_base = OTHER; note = sugar modification: 2'-O-methoxyethylribose; note = backbone modification: 5'-phosphorothioate
  modified_base 6: mod_base = OTHER; note = backbone modification: 5'-phosphorothioate; note = sugar modification: 2'-O-methoxyethylribose
  modified_base 7: mod_base = OTHER; note = sugar modification: 2'-O-methoxyethylribose; note = backbone modification: 5'-phosphorothioate
  modified_base 8: mod_base = OTHER; note = sugar modification: 2'-O-methoxyethylribose; note = thymine; note = backbone modification: 5'-phosphorothioate
  modified_base 9: mod_base = OTHER; note = backbone modification: 5'-phosphorothioate; note = sugar modification: 2'-O-methoxyethylribose; note = thymine
  modified_base 10: mod_base = m5c; mod_base = OTHER; note = sugar modification: 2'-O-methoxyethylribose; note = backbone modification: 5'-phosphorothioate
  modified_base 11: mod_base = OTHER; note = sugar modification: 2'-O-methoxyethylribose; note = backbone modification: 5'-phosphorothioate; note = thymine
  modified_base 12: mod_base = OTHER; note = sugar modification: 2'-O-methoxyethylribose; note = backbone modification: 5'-phosphorothioate; note = thymine
  modified_base 13: mod_base = OTHER; note = backbone modification: 5'-phosphorothioate; note = sugar modification: 2'-O-methoxyethylribose; note = thymine
  modified_base 14: mod_base = m5c; mod_base = OTHER; note = sugar modification: 2'-O-methoxyethylribose; note = backbone modification: 5'-phosphorothioate
  modified_base 15: mod_base = OTHER; note = backbone modification: 5'-phosphorothioate; note = sugar modification: 2'-O-methoxyethylribose
  modified_base 16: mod_base = OTHER; note = sugar modification: 2'-O-methoxyethylribose; note = backbone modification: 5'-phosphorothioate
  modified_base 17: mod_base = m5c; mod_base = OTHER; note = backbone modification: 5'-phosphorothioate; note = sugar modification: 2'-O-methoxyethylribose
  modified_base 18: mod_base = OTHER; note = sugar modification: 2'-O-methoxyethylribose; note = thymine; note = backbone modification: 5'-phosphorothioate
  modified_base 19: mod_base = OTHER; note = backbone modification: 5'-phosphorothioate; note = sugar modification: 2'-O-methoxyethylribose
  modified_base 20: mod_base = OTHER; note = sugar modification: 2'-O-methoxyethylribose
ttctgaattctttcaactag

SEQ ID NO: 1122 - RNA, 18 nt, synthetic construct
  source 1..18: mol_type = other RNA; note = Antisense oligonucleotide
  modified_base 1: mod_base = OTHER; note = thymine; note = backbone modification: 5'-phosphorothioate; note = sugar modification: lna
  modified_base 2: mod_base = OTHER; note = backbone modification: 5'-phosphorothioate; note = sugar modification: 2'-O-methoxyethylribose
  modified_base 3: mod_base = OTHER; note = thymine; note = backbone modification: 5'-phosphorothioate
  modified_base 4: mod_base = OTHER; note = sugar modification: 2'-O-methoxyethylribose; note = thymine; note = backbone modification: 5'-phosphorothioate
  modified_base 5: mod_base = OTHER; mod_base = m5c; note = backbone modification: 5'-phosphorothioate; note = sugar modification: 2'-O-methoxyethylribose
  modified_base 6: mod_base = OTHER; note = backbone modification: 5'-phosphorothioate; note = sugar modification: 2'-O-methoxyethylribose; note = thymine
  modified_base 7: mod_base = OTHER; note = backbone modification: 5'-phosphorothioate; note = sugar modification: 2'-O-methoxyethylribose; note = thymine
  modified_base 8: mod_base = OTHER; note = backbone modification: 5'-phosphorothioate; note = sugar modification: 2'-O-methoxyethylribose
  modified_base 9: mod_base = OTHER; note = thymine; note = backbone modification: 5'-phosphorothioate; note = sugar modification: 2'-O-methoxyethylribose
  modified_base 10: mod_base = OTHER; note = backbone modification: 5'-phosphorothioate; note = sugar modification: 2'-O-methoxyethylribose
  modified_base 11: mod_base = m5c; mod_base = OTHER; note = sugar modification: 2'-O-methoxyethylribose; note = backbone modification: 5'-phosphorothioate
  modified_base 12: mod_base = OTHER; note = backbone modification: 5'-phosphorothioate; note = sugar modification: 2'-O-methoxyethylribose; note = thymine
  modified_base 13: mod_base = OTHER; note = thymine; note = backbone modification: 5'-phosphorothioate; note = sugar modification: 2'-O-methoxyethylribose
  modified_base 14: mod_base = m5c; mod_base = OTHER; note = sugar modification: 2'-O-methoxyethylribose; note = backbone modification: 5'-phosphorothioate
  modified_base 15: mod_base = OTHER; note = sugar modification: 2'-O-methoxyethylribose; note = backbone modification: 5'-phosphorothioate
  modified_base 16: mod_base = OTHER; note = backbone modification: 5'-phosphorothioate; note = sugar modification: 2'-O-methoxyethylribose; note = thymine
  modified_base 17: mod_base = m5c; mod_base = OTHER; note = backbone modification: 5'-phosphorothioate; note = sugar modification: 2'-O-methoxyethylribose
  modified_base 18: mod_base = m5c; mod_base = OTHER; note = sugar modification: lna
tgttcttgtacttcatcc

SEQ ID NO: 1123 - RNA, 18 nt, synthetic construct
  source 1..18: mol_type = other RNA; note = Antisense oligonucleotide
  modified_base 1: mod_base = OTHER; note = backbone modification: 5'-phosphorothioate; note = sugar modification: lna; note = thymine
  modified_base 2: mod_base = OTHER; note = backbone modification: 5'-phosphorothioate; note = sugar modification: lna
  modified_base 3: mod_base = OTHER; note = sugar modification: 2'-O-methoxyethylribose; note = thymine; note = backbone modification: 5'-phosphorothioate
  modified_base 4: mod_base = OTHER; note = backbone modification: 5'-phosphorothioate; note = thymine
  modified_base 5: mod_base = OTHER; mod_base = m5c; note = sugar modification: 2'-O-methoxyethylribose; note = backbone modification: 5'-phosphorothioate
  modified_base 6: mod_base = OTHER; note = backbone modification: 5'-phosphorothioate; note = thymine; note = sugar modification: 2'-O-methoxyethylribose
  modified_base 7: mod_base = OTHER; note = thymine; note = backbone modification: 5'-phosphorothioate; note = sugar modification: 2'-O-methoxyethylribose
  modified_base 8: mod_base = OTHER; note = backbone modification: 5'-phosphorothioate; note = sugar modification: 2'-O-methoxyethylribose
  modified_base 9: mod_base = OTHER; note = sugar modification: 2'-O-methoxyethylribose; note = thymine; note = backbone modification: 5'-phosphorothioate
  modified_base 10: mod_base = OTHER; note = sugar modification: 2'-O-methoxyethylribose; note = backbone modification: 5'-phosphorothioate
  modified_base 11: mod_base = m5c; mod_base = OTHER; note = backbone modification: 5'-phosphorothioate; note = sugar modification: 2'-O-methoxyethylribose
  modified_base 12: mod_base = OTHER; note = backbone modification: 5'-phosphorothioate; note = thymine; note = sugar modification: 2'-O-methoxyethylribose
  modified_base 13: mod_base = OTHER; note = backbone modification: 5'-phosphorothioate; note = sugar modification: 2'-O-methoxyethylribose; note = thymine
  modified_base 14: mod_base = OTHER; mod_base = m5c; note = sugar modification: 2'-O-methoxyethylribose; note = backbone modification: 5'-phosphorothioate
  modified_base 15: mod_base = OTHER; note = backbone modification: 5'-phosphorothioate; note = sugar modification: 2'-O-methoxyethylribose
  modified_base 16: mod_base = OTHER; note = thymine; note = sugar modification: 2'-O-methoxyethylribose; note = backbone modification: 5'-phosphorothioate
  modified_base 17: mod_base = m5c; mod_base = OTHER; note = backbone modification: 5'-phosphorothioate; note = sugar modification: lna
  modified_base 18: mod_base = m5c; mod_base = OTHER; note = sugar modification: lna
tgttcttgtacttcatcc

SEQ ID NO: 1124 - RNA, 18 nt, synthetic construct
  source 1..18: mol_type = other RNA; note = Antisense oligonucleotide
  modified_base 1: mod_base = OTHER; note = backbone modification: 5'-phosphorothioate; note = thymine; note = sugar modification: lna
  modified_base 2: mod_base = OTHER; note = backbone modification: 5'-phosphorothioate; note = sugar modification: lna
  modified_base 3: mod_base = OTHER; note = sugar modification: lna; note = thymine; note = backbone modification: 5'-phosphorothioate
  modified_base 4: mod_base = OTHER; note = thymine; note = backbone modification: 5'-phosphorothioate; note = sugar modification: 2'-O-methoxyethylribose
  modified_base 5: mod_base = m5c; mod_base = OTHER; note = backbone modification: 5'-phosphorothioate
  modified_base 6: mod_base = OTHER; note = thymine; note = sugar modification: 2'-O-methoxyethylribose; note = backbone modification: 5'-phosphorothioate
  modified_base 7: mod_base = OTHER; note = sugar modification: 2'-O-methoxyethylribose; note = thymine; note = backbone modification: 5'-phosphorothioate
  modified_base 8: mod_base = OTHER; note = sugar modification: 2'-O-methoxyethylribose; note = backbone modification: 5'-phosphorothioate
  modified_base 9: mod_base = OTHER; note = backbone modification: 5'-phosphorothioate; note = thymine; note = sugar modification: 2'-O-methoxyethylribose
  modified_base 10: mod_base = OTHER; note = sugar modification: 2'-O-methoxyethylribose; note = backbone modification: 5'-phosphorothioate
  modified_base 11: mod_base = m5c; mod_base = OTHER; note = backbone modification: 5'-phosphorothioate; note = sugar modification: 2'-O-methoxyethylribose
  modified_base 12: mod_base = OTHER; note = sugar modification: 2'-O-methoxyethylribose; note = backbone modification: 5'-phosphorothioate; note = thymine
  modified_base 13: mod_base = OTHER; note = sugar modification: 2'-O-methoxyethylribose; note = thymine; note = backbone modification: 5'-phosphorothioate
  modified_base 14: mod_base = m5c; mod_base = OTHER; note = sugar modification: 2'-O-methoxyethylribose; note = backbone modification: 5'-phosphorothioate
  modified_base 15: mod_base = OTHER; note = backbone modification: 5'-phosphorothioate; note = sugar modification: 2'-O-methoxyethylribose
  modified_base 16: mod_base = OTHER; note = backbone modification: 5'-phosphorothioate; note = sugar modification: lna; note = thymine
  modified_base 17: mod_base = OTHER; mod_base = m5c; note = backbone modification: 5'-phosphorothioate; note = sugar modification: lna
  modified_base 18: mod_base = m5c; mod_base = OTHER; note = sugar modification: lna
tgttcttgtacttcatcc

SEQ ID NO: 1125 - RNA, 18 nt, synthetic construct
  source 1..18: mol_type = other RNA; note = Antisense oligonucleotide
  modified_base 1: mod_base = OTHER; note = thymine; note = backbone modification: 5'-phosphorothioate; note = sugar modification: lna
  modified_base 2: mod_base = OTHER; note = sugar modification: lna; note = backbone modification: 5'-phosphorothioate
  modified_base 3: mod_base = OTHER; note = thymine; note = backbone modification: 5'-phosphorothioate; note = sugar modification: lna
  modified_base 4: mod_base = OTHER; note = thymine; note = sugar modification: lna; note = backbone modification: 5'-phosphorothioate
  modified_base 5: mod_base = m5c; mod_base = OTHER; note = sugar modification: 2'-O-methoxyethylribose; note = backbone modification: 5'-phosphorothioate
  modified_base 6: mod_base = OTHER; note = backbone modification: 5'-phosphorothioate; note = thymine
  modified_base 7: mod_base = OTHER; note = backbone modification: 5'-phosphorothioate; note = thymine; note = sugar modification: 2'-O-methoxyethylribose
  modified_base 8: mod_base = OTHER; note = backbone modification: 5'-phosphorothioate; note = sugar modification: 2'-O-methoxyethylribose
  modified_base 9: mod_base = OTHER; note = backbone modification: 5'-phosphorothioate; note = thymine; note = sugar modification: 2'-O-methoxyethylribose
  modified_base 10: mod_base = OTHER; note = sugar modification: 2'-O-methoxyethylribose; note = backbone modification: 5'-phosphorothioate
  modified_base 11: mod_base = OTHER; mod_base = m5c; note = sugar modification: 2'-O-methoxyethylribose; note = backbone modification: 5'-phosphorothioate
  modified_base 12: mod_base = OTHER; note = thymine; note = sugar modification: 2'-O-methoxyethylribose; note = backbone modification: 5'-phosphorothioate
  modified_base 13: mod_base = OTHER; note = sugar modification: 2'-O-methoxyethylribose; note = thymine; note = backbone modification: 5'-phosphorothioate
  modified_base 14: mod_base = m5c; mod_base = OTHER; note = backbone modification: 5'-phosphorothioate; note = sugar modification: 2'-O-methoxyethylribose
  modified_base 15: mod_base = OTHER; note = backbone modification: 5'-phosphorothioate; note = sugar modification: lna
  modified_base 16: mod_base = OTHER; note = sugar modification: lna; note = backbone modification: 5'-phosphorothioate; note = thymine
  modified_base 17: mod_base = OTHER; mod_base = m5c; note = backbone modification: 5'-phosphorothioate; note = sugar modification: lna
  modified_base 18: mod_base = OTHER; mod_base = m5c; note = sugar modification: lna
tgttcttgtacttcatcc

SEQ ID NO: 1126 - RNA, 18 nt, synthetic construct
  source 1..18: mol_type = other RNA; note = Antisense oligonucleotide
  modified_base 1: mod_base = OTHER; note = thymine; note = sugar modification: lna; note = backbone modification: 5'-phosphorothioate
  modified_base 2: mod_base = OTHER; note = sugar modification: lna; note = backbone modification: 5'-phosphorothioate
  modified_base 3: mod_base = OTHER; note = backbone modification: 5'-phosphorothioate; note = thymine; note = sugar modification: lna
  modified_base 4: mod_base = OTHER; note = backbone modification: 5'-phosphorothioate; note = thymine; note = sugar modification: lna
  modified_base 5: mod_base = OTHER; mod_base = m5c; note = backbone modification: 5'-phosphorothioate; note = sugar modification: lna
  modified_base 6: mod_base = OTHER; note = backbone modification: 5'-phosphorothioate; note = thymine; note = sugar modification: 2'-O-methoxyethylribose
  modified_base 7: mod_base = OTHER; note = thymine; note = backbone modification: 5'-phosphorothioate
  modified_base 8: mod_base = OTHER; note = sugar modification: 2'-O-methoxyethylribose; note = backbone modification: 5'-phosphorothioate
  modified_base 9: mod_base = OTHER; note = backbone modification: 5'-phosphorothioate; note = sugar modification: 2'-O-methoxyethylribose; note = thymine
  modified_base 10: mod_base = OTHER; note = backbone modification: 5'-phosphorothioate; note = sugar modification: 2'-O-methoxyethylribose
  modified_base 11: mod_base = OTHER; mod_base = m5c; note = sugar modification: 2'-O-methoxyethylribose; note = backbone modification: 5'-phosphorothioate
  modified_base 12: mod_base = OTHER; note = backbone modification: 5'-phosphorothioate; note = sugar modification: 2'-O-methoxyethylribose; note = thymine
  modified_base 13: mod_base = OTHER; note = backbone modification: 5'-phosphorothioate; note = thymine; note = sugar modification: 2'-O-methoxyethylribose
  modified_base 14: mod_base = m5c; mod_base = OTHER; note = backbone modification: 5'-phosphorothioate; note = sugar modification: lna
  modified_base 15: mod_base = OTHER; note = sugar modification: lna; note = backbone modification: 5'-phosphorothioate
  modified_base 16: mod_base = OTHER; note = thymine; note = sugar modification: lna; note = backbone modification: 5'-phosphorothioate
  modified_base 17: mod_base = m5c; mod_base = OTHER; note = backbone modification: 5'-phosphorothioate; note = sugar modification: lna
  modified_base 18: mod_base = m5c; mod_base = OTHER; note = sugar modification: lna
tgttcttgtacttcatcc

SEQ ID NO: 1127 - RNA, 18 nt, synthetic construct
  source 1..18: mol_type = other RNA; note = Antisense oligonucleotide
  modified_base 1: mod_base = OTHER; note = thymine; note = sugar modification: lna; note = backbone modification: 5'-phosphorothioate
  modified_base 2: mod_base = OTHER; note = backbone modification: 5'-phosphorothioate; note = sugar modification: lna
  modified_base 3: mod_base = OTHER; note = thymine; note = sugar modification: lna; note = backbone modification: 5'-phosphorothioate
  modified_base 4: mod_base = OTHER; note = backbone modification: 5'-phosphorothioate; note = sugar modification: lna; note = thymine
  modified_base 5: mod_base = m5c; mod_base = OTHER; note = sugar modification: lna; note = backbone modification: 5'-phosphorothioate
  modified_base 6: mod_base = OTHER; note = backbone modification: 5'-phosphorothioate; note = thymine; note = sugar modification: lna
  modified_base 7: mod_base = OTHER; note = thymine; note = sugar modification: 2'-O-methoxyethylribose; note = backbone modification: 5'-phosphorothioate
  modified_base 8: mod_base = OTHER; note = backbone modification: 5'-phosphorothioate
  modified_base 9: mod_base = OTHER; note = backbone modification: 5'-phosphorothioate; note = sugar modification: 2'-O-methoxyethylribose; note = thymine
  modified_base 10: mod_base = OTHER; note = backbone modification: 5'-phosphorothioate; note = sugar modification: 2'-O-methoxyethylribose
  modified_base 11: mod_base = m5c; mod_base = OTHER; note = backbone modification: 5'-phosphorothioate; note = sugar modification: 2'-O-methoxyethylribose
  modified_base 12: mod_base = OTHER; note = backbone modification: 5'-phosphorothioate; note = sugar modification: 2'-O-methoxyethylribose; note = thymine
  modified_base 13: mod_base = OTHER; note = sugar modification: lna; note = backbone modification: 5'-phosphorothioate; note = thymine
  modified_base 14: mod_base = OTHER; mod_base = m5c; note = backbone modification: 5'-phosphorothioate; note = sugar modification: lna
  modified_base 15: mod_base = OTHER; note = sugar modification: lna; note = backbone modification: 5'-phosphorothioate
  modified_base 16: mod_base = OTHER; note = thymine; note = sugar modification: lna; note = backbone modification: 5'-phosphorothioate
  modified_base 17: mod_base = m5c; mod_base = OTHER; note = backbone modification: 5'-phosphorothioate; note = sugar modification: lna
  modified_base 18: mod_base = m5c; mod_base = OTHER; note = sugar modification: lna
tgttcttgtacttcatcc

SEQ ID NO: 1128 - RNA, 18 nt, synthetic construct
  source 1..18: mol_type = other RNA; note = Antisense oligonucleotide
  modified_base 1: mod_base = OTHER; note = backbone modification: 5'-phosphorothioate; note = thymine; note = sugar modification: lna
  modified_base 2: mod_base = OTHER; note = backbone modification: 5'-phosphorothioate
  modified_base 3: mod_base = OTHER; note = backbone modification: 5'-phosphorothioate
  modified_base 4: mod_base = OTHER; note = backbone modification: 5'-phosphorothioate
  modified_base 5: mod_base = OTHER; note = backbone modification: 5'-phosphorothioate
  modified_base 6: mod_base = OTHER; note = backbone modification: 5'-phosphorothioate
  modified_base 7: mod_base = OTHER; note = backbone modification: 5'-phosphorothioate
  modified_base 8: mod_base = OTHER; note = backbone modification: 5'-phosphorothioate
  modified_base 9: mod_base = OTHER; note = backbone modification: 5'-phosphorothioate
  modified_base 10: mod_base = OTHER; note = backbone modification: 5'-phosphorothioate
  modified_base 11: mod_base = OTHER; note = backbone modification: 5'-phosphorothioate
  modified_base 12: mod_base = OTHER; note = backbone modification: 5'-phosphorothioate
  modified_base 13: mod_base = OTHER; note = backbone modification: 5'-phosphorothioate
  modified_base 14: mod_base = OTHER; note = backbone modification: 5'-phosphorothioate
  modified_base 15: mod_base = OTHER; note = backbone modification: 5'-phosphorothioate
  modified_base 16: mod_base = OTHER; note = backbone modification: 5'-phosphorothioate
  modified_base 17: mod_base = OTHER; mod_base = m5c; note = sugar modification: lna; note = backbone modification: 5'-phosphorothioate
  modified_base 18: mod_base = m5c; mod_base = OTHER; note = sugar modification: lna
tgttcttgtacttcatcc

SEQ ID NO: 1129 - RNA, 18 nt, synthetic construct
  source 1..18: mol_type = other RNA; note = Antisense oligonucleotide
  modified_base 1: mod_base = OTHER; note = thymine; note = sugar modification: lna; note = backbone modification: 5'-phosphorothioate
  modified_base 2: mod_base = OTHER; note = sugar modification: lna; note = backbone modification: 5'-phosphorothioate
  modified_base 3: mod_base = OTHER; note = backbone modification: 5'-phosphorothioate
  modified_base 4: mod_base = OTHER; note = backbone modification: 5'-phosphorothioate
  modified_base 5: mod_base = OTHER; note = backbone modification: 5'-phosphorothioate
  modified_base 6: mod_base = OTHER; note = backbone modification: 5'-phosphorothioate
  modified_base 7: mod_base = OTHER; note = backbone modification: 5'-phosphorothioate
  modified_base 8: mod_base = OTHER; note = backbone modification: 5'-phosphorothioate
  modified_base 9: mod_base = OTHER; note = backbone modification: 5'-phosphorothioate
  modified_base 10: mod_base = OTHER; note = backbone modification: 5'-phosphorothioate
  modified_base 11: mod_base = OTHER; note = backbone modification: 5'-phosphorothioate
  modified_base 12: mod_base = OTHER; note = backbone modification: 5'-phosphorothioate
  modified_base 13: mod_base = OTHER; note = backbone modification: 5'-phosphorothioate
  modified_base 14: mod_base = OTHER; note = backbone modification: 5'-phosphorothioate
  modified_base 15: mod_base = OTHER; note = backbone modification: 5'-phosphorothioate
  modified_base 16: mod_base = OTHER; note = backbone modification: 5'-phosphorothioate
  modified_base 17: mod_base = OTHER; note = backbone modification: 5'-phosphorothioate
  modified_base 18: mod_base = OTHER; mod_base = m5c; note = sugar modification: lna
tgttcttgtacttcatcc

SEQ ID NO: 1130 - RNA, 18 nt, synthetic construct
  source 1..18: mol_type = other RNA; note = Antisense oligonucleotide
  modified_base 1: mod_base = OTHER; note = thymine; note = backbone modification: 5'-phosphorothioate; note = sugar modification: lna
  modified_base 2: mod_base = OTHER; note = backbone modification: 5'-phosphorothioate
  modified_base 3: mod_base = OTHER; note = backbone modification: 5'-phosphorothioate
  modified_base 4: mod_base = OTHER; note = backbone modification: 5'-phosphorothioate
  modified_base 5: mod_base = OTHER; note = backbone modification: 5'-phosphorothioate
  modified_base 6: mod_base = OTHER; note = backbone modification: 5'-phosphorothioate
  modified_base 7: mod_base = OTHER; note = backbone modification: 5'-phosphorothioate
  modified_base 8: mod_base = OTHER; note = backbone modification: 5'-phosphorothioate
  modified_base 9: mod_base = OTHER; note = backbone modification: 5'-phosphorothioate
  modified_base 10: mod_base = OTHER; note = backbone modification: 5'-phosphorothioate
  modified_base 11: mod_base = OTHER; note = backbone modification: 5'-phosphorothioate
  modified_base 12: mod_base = OTHER; note = backbone modification: 5'-phosphorothioate
  modified_base 13: mod_base = OTHER; note = backbone modification: 5'-phosphorothioate
  modified_base 14: mod_base = OTHER; note = backbone modification: 5'-phosphorothioate
  modified_base 15: mod_base = OTHER; note = backbone modification: 5'-phosphorothioate
  modified_base 16: mod_base = OTHER; note = backbone modification: 5'-phosphorothioate
  modified_base 17: mod_base = OTHER; note = backbone modification: 5'-phosphorothioate
  modified_base 18: mod_base = OTHER; mod_base = m5c; note = sugar modification: lna
tgttcttgtacttcatcc

SEQ ID NO: 1131 - RNA, 18 nt, synthetic construct
  source 1..18: mol_type = other RNA; note = Antisense oligonucleotide
  modified_base 1: mod_base = OTHER; note = sugar modification: lna; note = backbone modification: 5'-phosphorothioate; note = thymine
  modified_base 2: mod_base = OTHER; note = sugar modification: lna; note = backbone modification: 5'-phosphorothioate
  modified_base 3: mod_base = OTHER; note = thymine; note = backbone modification: 5'-phosphorothioate; note = sugar modification: lna
  modified_base 4: mod_base = OTHER; note = backbone modification: 5'-phosphorothioate
  modified_base 5: mod_base = OTHER; note = backbone modification: 5'-phosphorothioate
  modified_base 6: mod_base = OTHER; note = backbone modification: 5'-phosphorothioate
  modified_base 7: mod_base = OTHER; note = backbone modification: 5'-phosphorothioate
  modified_base 8: mod_base = OTHER; note = backbone modification: 5'-phosphorothioate
  modified_base 9: mod_base = OTHER; note = backbone modification: 5'-phosphorothioate
  modified_base 10: mod_base = OTHER; note = backbone modification: 5'-phosphorothioate
  modified_base 11: mod_base = OTHER; note = backbone modification: 5'-phosphorothioate
  modified_base 12: mod_base = OTHER; note = backbone modification: 5'-phosphorothioate
  modified_base 13: mod_base = OTHER; note = backbone modification: 5'-phosphorothioate
  modified_base 14: mod_base = OTHER; note = backbone modification: 5'-phosphorothioate
  modified_base 15: mod_base = OTHER; note = backbone modification: 5'-phosphorothioate
  modified_base 16: mod_base = OTHER; note = backbone modification: 5'-phosphorothioate; note = thymine; note = sugar modification: lna
  modified_base 17: mod_base = m5c; mod_base = OTHER; note = backbone modification: 5'-phosphorothioate; note = sugar modification: lna
  modified_base 18: mod_base = m5c; mod_base = OTHER; note = sugar modification: lna
tgttcttgtacttcatcc

SEQ ID NO: 1132 - RNA, 18 nt, synthetic construct
  source 1..18: mol_type = other RNA; note = Antisense oligonucleotide
  modified_base 1: mod_base = OTHER; note = sugar modification: lna; note = thymine; note = backbone modification: 5'-phosphorothioate
  modified_base 2: mod_base = OTHER; note = backbone modification: 5'-phosphorothioate; note = sugar modification: lna
  modified_base 3: mod_base = OTHER; note = thymine; note = sugar modification: lna; note = backbone modification: 5'-phosphorothioate
  modified_base 4: mod_base = OTHER; note = backbone modification: 5'-phosphorothioate
  modified_base 5: mod_base = OTHER; note = backbone modification: 5'-phosphorothioate
  modified_base 6: mod_base = OTHER; note = backbone modification: 5'-phosphorothioate
  modified_base 7: mod_base = OTHER; note = backbone modification: 5'-phosphorothioate
  modified_base 8: mod_base = OTHER; note = backbone modification: 5'-phosphorothioate
  modified_base 9: mod_base = OTHER; note = backbone modification: 5'-phosphorothioate
  modified_base 10: mod_base = OTHER; note = backbone modification: 5'-phosphorothioate
  modified_base 11: mod_base = OTHER; note = backbone modification: 5'-phosphorothioate
  modified_base 12: mod_base = OTHER; note = backbone modification: 5'-phosphorothioate
  modified_base 13: mod_base = OTHER; note = backbone modification: 5'-phosphorothioate
  modified_base 14: mod_base = OTHER; note = backbone modification: 5'-phosphorothioate
  modified_base 15: mod_base = OTHER; note = backbone modification: 5'-phosphorothioate
  modified_base 16: mod_base = OTHER; note = backbone modification: 5'-phosphorothioate
  modified_base 17: mod_base = OTHER; mod_base = m5c; note = backbone modification: 5'-phosphorothioate; note = sugar modification: lna
  modified_base 18: mod_base = OTHER; mod_base = m5c; note = sugar modification: lna
tgttcttgtacttcatcc

SEQ ID NO: 1133 - RNA, 18 nt, synthetic construct
  source 1..18: mol_type = other RNA; note = Antisense oligonucleotide
  modified_base 1: mod_base = OTHER; note = thymine; note = backbone modification: 5'-phosphorothioate; note = sugar modification: lna
  modified_base 2: mod_base = OTHER; note = backbone modification: 5'-phosphorothioate; note = sugar modification: lna
  modified_base 3: mod_base = OTHER; note = backbone modification: 5'-phosphorothioate
  modified_base 4: mod_base = OTHER; note = backbone modification: 5'-phosphorothioate; note = thymine; note = sugar modification: lna
  modified_base 5: mod_base = OTHER; note = backbone modification: 5'-phosphorothioate
  modified_base 6: mod_base = OTHER; note = backbone modification: 5'-phosphorothioate
  modified_base 7: mod_base = OTHER; note = backbone modification: 5'-phosphorothioate
  modified_base 8: mod_base = OTHER; note = backbone modification: 5'-phosphorothioate
  modified_base 9: mod_base = OTHER; note = backbone modification: 5'-phosphorothioate
  modified_base 10: mod_base = OTHER; note = backbone modification: 5'-phosphorothioate
  modified_base 11: mod_base = OTHER; note = backbone modification: 5'-phosphorothioate
  modified_base 12: mod_base = OTHER; note = backbone modification: 5'-phosphorothioate
  modified_base 13: mod_base = OTHER; note = backbone modification: 5'-phosphorothioate
  modified_base 14: mod_base = OTHER; note = backbone modification: 5'-phosphorothioate
  modified_base 15: mod_base = OTHER; note = backbone modification: 5'-phosphorothioate
  modified_base 16: mod_base = OTHER; note = backbone modification: 5'-phosphorothioate
  modified_base 17: mod_base = m5c; mod_base = OTHER; note = sugar modification: lna; note = backbone modification: 5'-phosphorothioate
  modified_base 18: mod_base = OTHER; mod_base = m5c; note = sugar modification: lna
tgttcttgtacttcatcc

SEQ ID NO: 1134 - RNA, 18 nt, synthetic construct
  source 1..18: mol_type = other RNA; note = Antisense oligonucleotide
  modified_base 1: mod_base = OTHER; note = backbone modification: 5'-phosphorothioate; note = sugar modification: lna; note = thymine
  modified_base 2: mod_base = OTHER; note = backbone modification: 5'-phosphorothioate; note = sugar modification: lna
  modified_base 3: mod_base = OTHER; note = backbone modification: 5'-phosphorothioate
  modified_base 4: mod_base = OTHER; note = backbone modification: 5'-phosphorothioate
  modified_base 5: mod_base = OTHER; mod_base = m5c; note = backbone modification: 5'-phosphorothioate; note = sugar modification: lna
  modified_base 6: mod_base = OTHER; note = backbone modification: 5'-phosphorothioate
  modified_base 7: mod_base = OTHER; note = backbone modification: 5'-phosphorothioate
  modified_base 8: mod_base = OTHER; note = backbone modification: 5'-phosphorothioate
  modified_base 9: mod_base = OTHER; note = backbone modification: 5'-phosphorothioate
  modified_base 10: mod_base = OTHER; note = backbone modification: 5'-phosphorothioate
  modified_base 11: mod_base = OTHER; note = backbone modification: 5'-phosphorothioate
  modified_base 12: mod_base = OTHER; note = backbone modification: 5'-phosphorothioate
  modified_base 13: mod_base = OTHER; note = backbone modification: 5'-phosphorothioate
  modified_base 14: mod_base = OTHER; note = backbone modification: 5'-phosphorothioate
  modified_base 15: mod_base = OTHER; note = backbone modification: 5'-phosphorothioate
  modified_base 16: mod_base = OTHER; note = backbone modification: 5'-phosphorothioate
  modified_base 17: mod_base = OTHER; mod_base = m5c; note = backbone modification: 5'-phosphorothioate; note = sugar modification: lna
  modified_base 18: mod_base = OTHER; mod_base = m5c; note = sugar modification: lna
tgttcttgtacttcatcc

SEQ ID NO: 1135 - RNA, 18 nt, synthetic construct
  source 1..18: mol_type = other RNA; note = Antisense oligonucleotide
  modified_base 1: mod_base = OTHER; note = sugar modification: lna; note = thymine; note = backbone modification: 5'-phosphorothioate
  modified_base 2: mod_base = OTHER; note = sugar modification: lna; note = backbone modification: 5'-phosphorothioate
  modified_base 3: mod_base = OTHER; note = backbone modification: 5'-phosphorothioate
  modified_base 4: mod_base = OTHER; note = backbone modification: 5'-phosphorothioate
  modified_base 5: mod_base = OTHER; note = backbone modification: 5'-phosphorothioate
  modified_base 6: mod_base = OTHER; note = sugar modification: lna; note = thymine; note = backbone modification: 5'-phosphorothioate
  modified_base 7: mod_base = OTHER; note = backbone modification: 5'-phosphorothioate
  modified_base 8: mod_base = OTHER; note = backbone modification: 5'-phosphorothioate
  modified_base 9: mod_base = OTHER; note = backbone modification: 5'-phosphorothioate
  modified_base 10: mod_base = OTHER; note = backbone modification: 5'-phosphorothioate
  modified_base 11: mod_base = OTHER; note = backbone modification: 5'-phosphorothioate
  modified_base 12: mod_base = OTHER; note = backbone modification: 5'-phosphorothioate
  modified_base 13: mod_base = OTHER; note = backbone modification: 5'-phosphorothioate
  modified_base 14: mod_base = OTHER; note = backbone modification: 5'-phosphorothioate
  modified_base 15: mod_base = OTHER; note = backbone modification: 5'-phosphorothioate
  modified_base 16: mod_base = OTHER; note = backbone modification: 5'-phosphorothioate
  modified_base 17: mod_base = m5c; mod_base = OTHER; note = sugar modification: lna; note = backbone modification: 5'-phosphorothioate
  modified_base 18: mod_base = OTHER; mod_base = m5c; note = sugar modification: lna
tgttcttgtacttcatcc

SEQ ID NO: 1136 - RNA, 18 nt, synthetic construct
  source 1..18: mol_type = other RNA; note = Antisense oligonucleotide
  modified_base 1: mod_base = OTHER; note = sugar modification: lna; note = thymine; note = backbone modification: 5'-phosphorothioate
  modified_base 2: mod_base = OTHER; note = sugar modification: lna; note = backbone modification: 5'-phosphorothioate
  modified_base 3: mod_base = OTHER; note = backbone modification: 5'-phosphorothioate
  modified_base 4: mod_base = OTHER; note = backbone modification: 5'-phosphorothioate
  modified_base 5: mod_base = OTHER; note = backbone modification: 5'-phosphorothioate
  modified_base 6: mod_base = OTHER; note = backbone modification: 5'-phosphorothioate
  modified_base 7: mod_base = OTHER; note = sugar modification: lna; note = thymine; note = backbone modification: 5'-phosphorothioate
  modified_base 8: mod_base = OTHER; note = backbone modification: 5'-phosphorothioate
  modified_base 9: mod_base = OTHER; note = backbone modification: 5'-phosphorothioate
  modified_base 10: mod_base = OTHER; note = backbone modification: 5'-phosphorothioate
  modified_base 11: mod_base = OTHER; note = backbone modification: 5'-phosphorothioate
  modified_base 12: mod_base = OTHER; note = backbone modification: 5'-phosphorothioate
  modified_base 13: mod_base = OTHER; note = backbone modification: 5'-phosphorothioate
  modified_base 14: mod_base = OTHER; note = backbone modification: 5'-phosphorothioate
  modified_base 15: mod_base = OTHER; note = backbone modification: 5'-phosphorothioate
  modified_base 16: mod_base = OTHER; note = backbone modification: 5'-phosphorothioate
  modified_base 17: mod_base = OTHER; mod_base = m5c; note = sugar modification: lna; note = backbone modification: 5'-phosphorothioate
  modified_base 18: mod_base = m5c; mod_base = OTHER; note = sugar modification: lna
tgttcttgtacttcatcc

SEQ ID NO: 1137 - RNA, 18 nt, synthetic construct
  source 1..18: mol_type = other RNA; note = Antisense oligonucleotide
  modified_base 1: mod_base = OTHER; note = sugar modification: lna; note = backbone modification: 5'-phosphorothioate; note = thymine
  modified_base 2: mod_base = OTHER; note = backbone modification: 5'-phosphorothioate; note = sugar modification: lna
  modified_base 3: mod_base = OTHER; note = backbone modification: 5'-phosphorothioate
  modified_base 4: mod_base = OTHER; note = backbone modification: 5'-phosphorothioate
  modified_base 5: mod_base = OTHER; note = backbone modification: 5'-phosphorothioate
  modified_base 6: mod_base = OTHER; note = backbone modification: 5'-phosphorothioate
  modified_base 7: mod_base = OTHER; note = backbone modification: 5'-phosphorothioate
  modified_base 8: mod_base = OTHER; note = sugar modification: lna; note = backbone modification: 5'-phosphorothioate
  modified_base 9: mod_base = OTHER; note = backbone modification: 5'-phosphorothioate
  modified_base 10: mod_base = OTHER; note = backbone modification: 5'-phosphorothioate
  modified_base 11: mod_base = OTHER; note = backbone modification: 5'-phosphorothioate
  modified_base 12: mod_base = OTHER; note = backbone modification: 5'-phosphorothioate
  modified_base 13: mod_base = OTHER; note = backbone modification: 5'-phosphorothioate
  modified_base 14: mod_base = OTHER; note = backbone modification: 5'-phosphorothioate
  modified_base 15: mod_base = OTHER; note = backbone modification: 5'-phosphorothioate
  modified_base 16: mod_base = OTHER; note = backbone modification: 5'-phosphorothioate
  modified_base 17: mod_base = m5c; mod_base = OTHER; note = sugar modification: lna; note = backbone modification: 5'-phosphorothioate
  modified_base 18: mod_base = m5c; mod_base = OTHER; note = sugar modification: lna
tgttcttgtacttcatcc

SEQ ID NO: 1138 - RNA, 18 nt, synthetic construct
  source 1..18: mol_type = other RNA; note = Antisense oligonucleotide
  modified_base 1: mod_base = OTHER; note = backbone modification: 5'-phosphorothioate; note = thymine; note = sugar modification: lna
  modified_base 2: mod_base = OTHER; note = sugar modification: lna; note = backbone modification: 5'-phosphorothioate
  modified_base 3: mod_base = OTHER; note = backbone modification: 5'-phosphorothioate
  modified_base 4: mod_base = OTHER; note = backbone modification: 5'-phosphorothioate
  modified_base 5: mod_base = OTHER; note = backbone modification: 5'-phosphorothioate
  modified_base 6: mod_base = OTHER; note = backbone modification: 5'-phosphorothioate
  modified_base 7: mod_base = OTHER; note = backbone modification: 5'-phosphorothioate
  modified_base 8: mod_base = OTHER; note = backbone modification: 5'-phosphorothioate
  modified_base 9: mod_base = OTHER; note = thymine; note = backbone modification: 5'-phosphorothioate; note = sugar modification: lna
  modified_base 10: mod_base = OTHER; note = backbone modification: 5'-phosphorothioate
  modified_base 11: mod_base = OTHER; note = backbone modification: 5'-phosphorothioate
  modified_base 12: mod_base = OTHER; note = backbone modification: 5'-phosphorothioate
  modified_base 13: mod_base = OTHER; note = backbone modification: 5'-phosphorothioate
  modified_base 14: mod_base = OTHER; note = backbone modification: 5'-phosphorothioate
  modified_base 15: mod_base = OTHER; note = backbone modification: 5'-phosphorothioate
  modified_base 16: mod_base = OTHER; note = backbone modification: 5'-phosphorothioate
  modified_base 17: mod_base = OTHER; mod_base = m5c; note = backbone modification: 5'-phosphorothioate; note = sugar modification: lna
  modified_base 18: mod_base = OTHER; mod_base = m5c; note = sugar modification: lna
tgttcttgtacttcatcc

SEQ ID NO: 1139 - RNA, 18 nt, synthetic construct
  source 1..18: mol_type = other RNA; note = Antisense oligonucleotide
  modified_base 1: mod_base = OTHER; note = backbone modification: 5'-phosphorothioate; note = thymine; note = sugar modification: lna
  modified_base 2: mod_base = OTHER; note = backbone modification: 5'-phosphorothioate; note = sugar modification: lna
  modified_base 3: mod_base = OTHER; note = backbone modification: 5'-phosphorothioate
  modified_base 4: mod_base = OTHER; note = backbone modification: 5'-phosphorothioate
  modified_base 5: mod_base = OTHER; note = backbone modification: 5'-phosphorothioate
  modified_base 6: mod_base = OTHER; note = backbone modification: 5'-phosphorothioate
  modified_base 7: mod_base = OTHER; note = backbone modification: 5'-phosphorothioate
  modified_base 8: mod_base = OTHER; note = backbone modification: 5'-phosphorothioate
  modified_base 9: mod_base = OTHER; note = backbone modification: 5'-phosphorothioate
  modified_base 10: mod_base = OTHER; note = backbone modification: 5'-phosphorothioate; note = sugar modification: lna
  modified_base 11: mod_base = OTHER; note = backbone modification: 5'-phosphorothioate
  modified_base 12: mod_base = OTHER; note = backbone modification: 5'-phosphorothioate
  modified_base 13: mod_base = OTHER; note = backbone modification: 5'-phosphorothioate
  modified_base 14: mod_base = OTHER; note = backbone modification: 5'-phosphorothioate
  modified_base 15: mod_base = OTHER; note = backbone modification: 5'-phosphorothioate
  modified_base 16: mod_base = OTHER; note = backbone modification: 5'-phosphorothioate
  modified_base 17: mod_base = m5c; mod_base = OTHER; note = sugar modification: lna; note = backbone modification: 5'-phosphorothioate
  modified_base 18: mod_base = m5c; mod_base = OTHER; note = sugar modification: lna
tgttcttgtacttcatcc

SEQ ID NO: 1140 - RNA, 18 nt, synthetic construct
  source 1..18: mol_type = other RNA; note = Antisense oligonucleotide
  modified_base 1: mod_base = OTHER; note = thymine; note = sugar modification: lna; note = backbone modification: 5'-phosphorothioate
  modified_base 2: mod_base = OTHER; note = backbone modification: 5'-phosphorothioate; note = sugar modification: lna
  modified_base 3: mod_base = OTHER; note = backbone modification: 5'-phosphorothioate
  modified_base 4: mod_base = OTHER; note = backbone modification: 5'-phosphorothioate
  modified_base 5: mod_base = OTHER; note = backbone modification: 5'-phosphorothioate
  modified_base 6: mod_base = OTHER; note = backbone modification: 5'-phosphorothioate
  modified_base 7: mod_base = OTHER; note = backbone modification: 5'-phosphorothioate
  modified_base 8: mod_base = OTHER; note = backbone modification: 5'-phosphorothioate
  modified_base 9: mod_base = OTHER; note = backbone modification: 5'-phosphorothioate
  modified_base 10: mod_base = OTHER; note = backbone modification: 5'-phosphorothioate
  modified_base 11: mod_base = m5c; mod_base = OTHER; note = backbone modification: 5'-phosphorothioate; note = sugar modification: lna
  modified_base 12: mod_base = OTHER; note = backbone modification: 5'-phosphorothioate
  modified_base 13: mod_base = OTHER; note = backbone modification: 5'-phosphorothioate
  modified_base 14: mod_base = OTHER; note = backbone modification: 5'-phosphorothioate
  modified_base 15: mod_base = OTHER; note = backbone modification: 5'-phosphorothioate
  modified_base 16: mod_base = OTHER; note = backbone modification: 5'-phosphorothioate
  modified_base 17: mod_base = m5c; mod_base = OTHER; note = sugar modification: lna; note = backbone modification: 5'-phosphorothioate
  modified_base 18: mod_base = m5c; mod_base = OTHER; note = sugar modification: lna
tgttcttgtacttcatcc

SEQ ID NO: 1141 - RNA, 18 nt, synthetic construct
  source 1..18: mol_type = other RNA; note = Antisense oligonucleotide
  modified_base 1: mod_base = OTHER; note = sugar modification: lna; note = backbone modification: 5'-phosphorothioate; note = thymine
  modified_base 2: mod_base = OTHER; note = sugar modification: lna; note = backbone modification: 5'-phosphorothioate
  modified_base 3: mod_base = OTHER; note = backbone modification: 5'-phosphorothioate
  modified_base 4: mod_base = OTHER; note = backbone modification: 5'-phosphorothioate
  modified_base 5: mod_base = OTHER; note = backbone modification: 5'-phosphorothioate
  modified_base 6: mod_base = OTHER; note = backbone modification: 5'-phosphorothioate
  modified_base 7: mod_base = OTHER; note = backbone modification: 5'-phosphorothioate
  modified_base 8: mod_base = OTHER; note = backbone modification: 5'-phosphorothioate
  modified_base 9: mod_base = OTHER; note = backbone modification: 5'-phosphorothioate
  modified_base 10: mod_base = OTHER; note = backbone modification: 5'-phosphorothioate
  modified_base 11: mod_base = OTHER; note = backbone modification: 5'-phosphorothioate
  modified_base 12: mod_base = OTHER; note = sugar modification: lna; note = thymine; note = backbone modification: 5'-phosphorothioate
  modified_base 13: mod_base = OTHER; note = backbone modification: 5'-phosphorothioate
  modified_base 14: mod_base = OTHER; note = backbone modification: 5'-phosphorothioate
  modified_base 15: mod_base = OTHER; note = backbone modification: 5'-phosphorothioate
  modified_base 16: mod_base = OTHER; note = backbone modification: 5'-phosphorothioate
  modified_base 17: mod_base = m5c; mod_base = OTHER; note = sugar modification: lna; note = backbone modification: 5'-phosphorothioate
  modified_base 18: mod_base = OTHER; mod_base = m5c; note = sugar modification: lna
tgttcttgtacttcatcc

SEQ ID NO: 1142 - RNA, 18 nt, synthetic construct
  source 1..18: mol_type = other RNA; note = Antisense oligonucleotide
  modified_base 1: mod_base = OTHER; note = thymine; note = sugar modification: lna; note = backbone modification: 5'-phosphorothioate
  modified_base 2: mod_base = OTHER; note = backbone modification: 5'-phosphorothioate; note = sugar modification: lna
  modified_base 3: mod_base = OTHER; note = backbone modification: 5'-phosphorothioate
  modified_base 4: mod_base = OTHER; note = backbone modification: 5'-phosphorothioate
  modified_base 5: mod_base = OTHER; note = backbone modification: 5'-phosphorothioate
  modified_base 6: mod_base = OTHER; note = backbone modification: 5'-phosphorothioate
  modified_base 7: mod_base = OTHER; note = backbone modification: 5'-phosphorothioate
  modified_base 8: mod_base = OTHER; note = backbone modification: 5'-phosphorothioate
  modified_base 9: mod_base = OTHER; note = backbone modification: 5'-phosphorothioate
  modified_base 10: mod_base = OTHER; note = backbone modification: 5'-phosphorothioate
  modified_base 11: mod_base = OTHER; note = backbone modification: 5'-phosphorothioate
  modified_base 12: mod_base = OTHER; note = backbone modification: 5'-phosphorothioate
  modified_base 13: mod_base = OTHER; note = thymine; note = backbone modification: 5'-phosphorothioate; note = sugar modification: lna
  modified_base 14: mod_base = OTHER; note = backbone modification: 5'-phosphorothioate
  modified_base 15: mod_base = OTHER; note = backbone modification: 5'-phosphorothioate
  modified_base 16: mod_base = OTHER; note = backbone modification: 5'-phosphorothioate
  modified_base 17: mod_base = m5c; mod_base = OTHER; note = backbone modification: 5'-phosphorothioate; note = sugar modification: lna
  modified_base 18: mod_base = m5c; mod_base = OTHER; note = sugar modification: lna
tgttcttgtacttcatcc

SEQ ID NO: 1143 - RNA, 18 nt, synthetic construct
  source 1..18: mol_type = other RNA; note = Antisense oligonucleotide
  modified_base 1: mod_base = OTHER; note = sugar modification: lna; note = backbone modification: 5'-phosphorothioate; note = thymine
  modified_base 2: mod_base = OTHER; note = sugar modification: lna; note = backbone modification: 5'-phosphorothioate
  modified_base 3: mod_base = OTHER; note = backbone modification: 5'-phosphorothioate
  modified_base 4: mod_base = OTHER; note = backbone modification: 5'-phosphorothioate
  modified_base 5: mod_base = OTHER; note = backbone modification: 5'-phosphorothioate
  modified_base 6: mod_base = OTHER; note = backbone modification: 5'-phosphorothioate
  modified_base 7: mod_base = OTHER; note = backbone modification: 5'-phosphorothioate
  modified_base 8: mod_base = OTHER; note = backbone modification: 5'-phosphorothioate
  modified_base 9: mod_base = OTHER; note = backbone modification: 5'-phosphorothioate
  modified_base 10: mod_base = OTHER; note = backbone modification: 5'-phosphorothioate
  modified_base 11: mod_base = OTHER; note = backbone modification: 5'-phosphorothioate
  modified_base 12: mod_base = OTHER; note = backbone modification: 5'-phosphorothioate
  modified_base 13: mod_base = OTHER; note = backbone modification: 5'-phosphorothioate
  modified_base 14: mod_base = m5c; mod_base = OTHER; note = sugar modification: lna; note = backbone modification: 5'-phosphorothioate
  modified_base 15: mod_base = OTHER; note = backbone modification: 5'-phosphorothioate
  modified_base 16: mod_base = OTHER; note = backbone modification: 5'-phosphorothioate
  modified_base 17: mod_base = m5c; mod_base = OTHER; note = backbone modification: 5'-phosphorothioate; note = sugar modification: lna
  modified_base 18: mod_base = OTHER; mod_base = m5c; note = sugar modification: lna
tgttcttgtacttcatcc

SEQ ID NO: 1144 - RNA, 18 nt, synthetic construct
  source 1..18: mol_type = other RNA; note = Antisense oligonucleotide
  modified_base 1: mod_base = OTHER; note = backbone modification: 5'-phosphorothioate; note = sugar modification: lna; note = thymine
  modified_base 2: mod_base = OTHER; note = sugar modification: lna; note = backbone modification: 5'-phosphorothioate
  modified_base 3: mod_base = OTHER; note = backbone modification: 5'-phosphorothioate
  modified_base 4: mod_base = OTHER; note = backbone modification: 5'-phosphorothioate
  modified_base 5: mod_base = OTHER; note = backbone modification: 5'-phosphorothioate
  modified_base 6: mod_base = OTHER; note = backbone modification: 5'-phosphorothioate
  modified_base 7: mod_base = OTHER; note = backbone modification: 5'-phosphorothioate
  modified_base 8: mod_base = OTHER; note = backbone modification: 5'-phosphorothioate
  modified_base 9: mod_base = OTHER; note = backbone modification: 5'-phosphorothioate
  modified_base 10: mod_base = OTHER; note = backbone modification: 5'-phosphorothioate
  modified_base 11: mod_base = OTHER; note = backbone modification: 5'-phosphorothioate
  modified_base 12: mod_base = OTHER; note = backbone modification: 5'-phosphorothioate
  modified_base 13: mod_base = OTHER; note = backbone modification: 5'-phosphorothioate
  modified_base 14: mod_base = OTHER; note = backbone modification: 5'-phosphorothioate
  modified_base 15: mod_base = OTHER; note = sugar modification: lna; note = backbone modification: 5'-phosphorothioate
  modified_base 16: mod_base = OTHER; note = backbone modification: 5'-phosphorothioate
  modified_base 17: mod_base = OTHER; mod_base = m5c; note = sugar modification: lna; note = backbone modification: 5'-phosphorothioate
  modified_base 18: mod_base = m5c; mod_base = OTHER; note = sugar modification: lna
tgttcttgtacttcatcc

SEQ ID NO: 1145 - RNA, 18 nt, synthetic construct
  source 1..18: mol_type = other RNA; note = Antisense oligonucleotide
  modified_base 1: mod_base = OTHER; note = thymine; note = sugar modification: lna; note = backbone modification: 5'-phosphorothioate
  modified_base 2: mod_base = OTHER; note = sugar modification: lna; note = backbone modification: 5'-phosphorothioate
  modified_base 3: mod_base = OTHER; note = backbone modification: 5'-phosphorothioate
  modified_base 4: mod_base = OTHER; note = backbone modification: 5'-phosphorothioate
  modified_base 5: mod_base = OTHER; note = backbone modification: 5'-phosphorothioate
  modified_base 6: mod_base = OTHER; note = backbone modification: 5'-phosphorothioate
  modified_base 7: mod_base = OTHER; note = backbone modification: 5'-phosphorothioate
  modified_base 8: mod_base = OTHER; note = backbone modification: 5'-phosphorothioate
  modified_base 9: mod_base = OTHER; note = backbone modification: 5'-phosphorothioate
  modified_base 10: mod_base = OTHER; note = backbone modification: 5'-phosphorothioate
  modified_base 11: mod_base = OTHER; note = backbone modification: 5'-phosphorothioate
  modified_base 12: mod_base = OTHER; note = backbone modification: 5'-phosphorothioate
  modified_base 13: mod_base = OTHER; note = backbone modification: 5'-phosphorothioate
  modified_base 14: mod_base = OTHER; note = backbone modification: 5'-phosphorothioate
  modified_base 15: mod_base = OTHER; note = backbone modification: 5'-phosphorothioate
  modified_base 16: mod_base = OTHER; note = backbone modification: 5'-phosphorothioate; note = sugar modification: lna; note = thymine
  modified_base 17: mod_base = OTHER; mod_base = m5c; note = sugar modification: lna; note = backbone modification: 5'-phosphorothioate
  modified_base 18: mod_base = m5c; mod_base = OTHER; note = sugar modification: lna
tgttcttgtacttcatcc

SEQ ID NO: 1146 - RNA, 18 nt, synthetic construct
  source 1..18: mol_type = other RNA; note = Antisense oligonucleotide
  modified_base 1: mod_base = OTHER; note = thymine; note = sugar modification: lna; note = backbone modification: 5'-phosphorothioate
  modified_base 2: mod_base = OTHER; note = backbone modification: 5'-phosphorothioate; note = sugar modification: lna
  modified_base 3: mod_base = OTHER; note = backbone modification: 5'-phosphorothioate; note = sugar modification: lna; note = thymine
  modified_base 4: mod_base = OTHER; note = backbone modification: 5'-phosphorothioate; note = thymine; note = sugar modification: lna
  modified_base 5: mod_base = OTHER; note = backbone modification: 5'-phosphorothioate
  modified_base 6: mod_base = OTHER; note = backbone modification: 5'-phosphorothioate
  modified_base 7: mod_base = OTHER; note = backbone modification: 5'-phosphorothioate
  modified_base 8: mod_base = OTHER; note = backbone modification: 5'-phosphorothioate
  modified_base 9: mod_base = OTHER; note = backbone modification: 5'-phosphorothioate
  modified_base 10: mod_base = OTHER; note = backbone modification: 5'-phosphorothioate
  modified_base 11: mod_base = OTHER; note = backbone modification: 5'-phosphorothioate
  modified_base 12: mod_base = OTHER; note = backbone modification: 5'-phosphorothioate
  modified_base 13: mod_base = OTHER; note = backbone modification: 5'-phosphorothioate
  modified_base 14: mod_base = OTHER; note = backbone modification: 5'-phosphorothioate
  modified_base 15: mod_base = OTHER; note = backbone modification: 5'-phosphorothioate; note = sugar modification: lna
  modified_base 16: mod_base = OTHER; note = backbone modification: 5'-phosphorothioate; note = thymine; note = sugar modification: lna
  modified_base 17: mod_base = m5c; mod_base = OTHER; note = sugar modification: lna; note = backbone modification: 5'-phosphorothioate
  modified_base 18: mod_base = OTHER; mod_base = m5c; note = sugar modification: lna
tgttcttgtacttcatcc

SEQ ID NO: 1147 - RNA, 18 nt, synthetic construct
  source 1..18: mol_type = other RNA; note = Antisense oligonucleotide
  modified_base 1: mod_base = OTHER; note = thymine; note = backbone modification: 5'-phosphorothioate; note = sugar modification: lna
  modified_base 2: mod_base = OTHER; note = backbone modification: 5'-phosphorothioate; note = sugar modification: lna
  modified_base 3: mod_base = OTHER; note = backbone modification: 5'-phosphorothioate; note = thymine; note = sugar modification: lna
  modified_base 4: mod_base = OTHER; note = sugar modification: lna; note = thymine; note = backbone modification: 5'-phosphorothioate
  modified_base 5: mod_base = m5c; mod_base = OTHER; note = backbone modification: 5'-phosphorothioate; note = sugar modification: lna
  modified_base 6: mod_base = OTHER; note = backbone modification: 5'-phosphorothioate
  modified_base 7: mod_base = OTHER; note = backbone modification: 5'-phosphorothioate
  modified_base 8: mod_base = OTHER; note = backbone modification: 5'-phosphorothioate
  modified_base 9: mod_base = OTHER; note = backbone modification: 5'-phosphorothioate
  modified_base 10: mod_base = OTHER; note = backbone modification: 5'-phosphorothioate
  modified_base 11: mod_base = OTHER; note = backbone modification: 5'-phosphorothioate
  modified_base 12: mod_base = OTHER; note = backbone modification: 5'-phosphorothioate
  modified_base 13: mod_base = OTHER; note = backbone modification: 5'-phosphorothioate
  modified_base 14: mod_base = OTHER; mod_base = m5c; note = backbone modification: 5'-phosphorothioate; note = sugar modification: lna
  modified_base 15: mod_base = OTHER; note = sugar modification: lna; note = backbone modification: 5'-phosphorothioate
  modified_base 16: mod_base = OTHER; note = backbone modification: 5'-phosphorothioate; note = thymine; note = sugar modification: lna
  modified_base 17: mod_base = OTHER; mod_base = m5c; note = sugar modification: lna; note = backbone modification: 5'-phosphorothioate
  modified_base 18: mod_base = OTHER; mod_base = m5c; note = sugar modification: lna
tgttcttgtacttcatcc

SEQ ID NO: 1148 - RNA, 18 nt, synthetic construct
  source 1..18: mol_type = other RNA; note = Antisense oligonucleotide
  modified_base 1: mod_base = OTHER; note = backbone modification: 5'-phosphorothioate; note = thymine; note = sugar modification: 2'-O-methoxyethylribose
  modified_base 2: mod_base = OTHER; note = backbone modification: 5'-phosphorothioate
  modified_base 3: mod_base = OTHER; note = backbone modification: 5'-phosphorothioate
  modified_base 4: mod_base = OTHER; note = backbone modification: 5'-phosphorothioate
  modified_base 5: mod_base = OTHER; note = backbone modification: 5'-phosphorothioate
  modified_base 6: mod_base = OTHER; note = backbone modification: 5'-phosphorothioate
  modified_base 7: mod_base = OTHER; note = backbone modification: 5'-phosphorothioate
  modified_base 8: mod_base = OTHER; note = backbone modification: 5'-phosphorothioate
  modified_base 9: mod_base = OTHER; note = backbone modification: 5'-phosphorothioate
  modified_base 10: mod_base = OTHER; note = backbone modification: 5'-phosphorothioate
  modified_base 11: mod_base = OTHER; note = backbone modification: 5'-phosphorothioate
  modified_base 12: mod_base = OTHER; note = backbone modification: 5'-phosphorothioate
  modified_base 13: mod_base = OTHER; note = backbone modification: 5'-phosphorothioate
  modified_base 14: mod_base = OTHER; note = backbone modification: 5'-phosphorothioate
  modified_base 15: mod_base = OTHER; note = backbone modification: 5'-phosphorothioate
  modified_base 16: mod_base = OTHER; note = backbone modification: 5'-phosphorothioate
  modified_base 17: mod_base = OTHER; note = backbone modification: 5'-phosphorothioate
  modified_base 18: mod_base = m5c; mod_base = OTHER; note = sugar modification: 2'-O-methoxyethylribose
tgttcttgtacttcatcc

SEQ ID NO: 1149 - RNA, 18 nt, synthetic construct
  source 1..18: mol_type = other RNA; note = Antisense oligonucleotide
  modified_base 1: mod_base = OTHER; note = sugar modification: 2'-O-methoxyethylribose; note = thymine; note = backbone modification: 5'-phosphorothioate
  modified_base 2: mod_base = OTHER; note = sugar modification: 2'-O-methoxyethylribose; note = backbone modification: 5'-phosphorothioate
  modified_base 3: mod_base = OTHER; note = backbone modification: 5'-phosphorothioate
  modified_base 4: mod_base = OTHER; note = backbone modification: 5'-phosphorothioate
  modified_base 5: mod_base = OTHER; note = backbone modification: 5'-phosphorothioate
  modified_base 6: mod_base = OTHER; note = backbone modification: 5'-phosphorothioate
  modified_base 7: mod_base = OTHER; note = backbone modification: 5'-phosphorothioate
  modified_base 8: mod_base = OTHER; note = backbone modification: 5'-phosphorothioate
  modified_base 9: mod_base = OTHER; note = backbone modification: 5'-phosphorothioate
  modified_base 10: mod_base = OTHER; note = backbone modification: 5'-phosphorothioate
  modified_base 11: mod_base = OTHER; note = backbone modification: 5'-phosphorothioate
  modified_base 12: mod_base = OTHER; note = backbone modification: 5'-phosphorothioate
  modified_base 13: mod_base = OTHER; note = backbone modification: 5'-phosphorothioate
  modified_base 14: mod_base = OTHER; note = backbone modification: 5'-phosphorothioate
  modified_base 15: mod_base = OTHER; note = backbone modification: 5'-phosphorothioate
  modified_base 16: mod_base = OTHER; note = backbone modification: 5'-phosphorothioate
  modified_base 17: mod_base = OTHER; mod_base = m5c; note = sugar modification: 2'-O-methoxyethylribose; note = backbone modification: 5'-phosphorothioate
  modified_base 18: mod_base = m5c; mod_base = OTHER; note = sugar modification: 2'-O-methoxyethylribose
tgttcttgtacttcatcc

SEQ ID NO: 1150 - RNA, 18 nt, synthetic construct
  source 1..18: mol_type = other RNA; note = Antisense oligonucleotide
  modified_base 1: mod_base = OTHER; note = thymine; note = backbone modification: 5'-phosphorothioate; note = sugar modification: 2'-O-methoxyethylribose
  modified_base 2: mod_base = OTHER; note = sugar modification: 2'-O-methoxyethylribose; note = backbone modification: 5'-phosphorothioate
  modified_base 3: mod_base = OTHER; note = thymine; note = backbone modification: 5'-phosphorothioate; note = sugar modification: 2'-O-methoxyethylribose
  modified_base 4: mod_base = OTHER; note = backbone modification: 5'-phosphorothioate
  modified_base 5: mod_base = OTHER; note = backbone modification: 5'-phosphorothioate
  modified_base 6: mod_base = OTHER; note = backbone modification: 5'-phosphorothioate
  modified_base 7: mod_base = OTHER; note = backbone modification: 5'-phosphorothioate
  modified_base 8: mod_base = OTHER; note = backbone modification: 5'-phosphorothioate
  modified_base 9: mod_base = OTHER; note = backbone modification: 5'-phosphorothioate
  modified_base 10: mod_base = OTHER; note = backbone modification: 5'-phosphorothioate
  modified_base 11: mod_base = OTHER; note = backbone modification: 5'-phosphorothioate
  modified_base 12: mod_base = OTHER; note = backbone modification: 5'-phosphorothioate
  modified_base 13: mod_base = OTHER; note = backbone modification: 5'-phosphorothioate
  modified_base 14: mod_base = OTHER; note = backbone modification: 5'-phosphorothioate
  modified_base 15: mod_base = OTHER; note = backbone modification: 5'-phosphorothioate
  modified_base 16: mod_base = OTHER; note = sugar modification: 2'-O-methoxyethylribose; note = backbone modification: 5'-phosphorothioate; note = thymine
  modified_base 17: mod_base = m5c; mod_base = OTHER; note = sugar modification: 2'-O-methoxyethylribose; note = backbone modification: 5'-phosphorothioate
  modified_base 18: mod_base = OTHER; mod_base = m5c; note = sugar modification: 2'-O-methoxyethylribose
tgttcttgtacttcatcc

SEQ ID NO: 1151 - RNA, 18 nt, synthetic construct
  source 1..18: mol_type = other RNA; note = Antisense oligonucleotide
  modified_base 1: mod_base = OTHER; note = backbone modification: 5'-phosphorothioate; note = sugar modification: 2'-O-methoxyethylribose; note = thymine
  modified_base 2: mod_base = OTHER; note = sugar modification: 2'-O-methoxyethylribose; note = backbone modification: 5'-phosphorothioate
  modified_base 3: mod_base = OTHER; note = sugar modification: 2'-O-methoxyethylribose; note = backbone modification: 5'-phosphorothioate; note = thymine
  modified_base 4: mod_base = OTHER; note = sugar modification: 2'-O-methoxyethylribose; note = backbone modification: 5'-phosphorothioate; note = thymine
  modified_base 5: mod_base = OTHER; note = backbone modification: 5'-phosphorothioate
  modified_base 6: mod_base = OTHER; note = backbone modification: 5'-phosphorothioate
  modified_base 7: mod_base = OTHER; note = backbone modification: 5'-phosphorothioate
  modified_base 8: mod_base = OTHER; note = backbone modification: 5'-phosphorothioate
  modified_base 9: mod_base = OTHER; note = backbone modification: 5'-phosphorothioate
  modified_base 10: mod_base = OTHER; note = backbone modification: 5'-phosphorothioate
  modified_base 11: mod_base = OTHER; note = backbone modification: 5'-phosphorothioate
  modified_base 12: mod_base = OTHER; note = backbone modification: 5'-phosphorothioate
  modified_base 13: mod_base = OTHER; note = backbone modification: 5'-phosphorothioate
  modified_base 14: mod_base = OTHER; note = backbone modification: 5'-phosphorothioate
  modified_base 15: mod_base = OTHER; note = backbone modification: 5'-phosphorothioate; note = sugar modification: 2'-O-methoxyethylribose
  modified_base 16: mod_base = OTHER; note = sugar modification: 2'-O-methoxyethylribose; note = backbone modification: 5'-phosphorothioate; note = thymine
  modified_base 17: mod_base = m5c; mod_base = OTHER; note = backbone modification: 5'-phosphorothioate; note = sugar modification: 2'-O-methoxyethylribose
  modified_base 18: mod_base = OTHER; mod_base = m5c; note = sugar modification: 2'-O-methoxyethylribose
tgttcttgtacttcatcc

SEQ ID NO: 1152 - RNA, 18 nt, synthetic construct
  source 1..18: mol_type = other RNA; note = Antisense oligonucleotide
  modified_base 1: mod_base = OTHER; note = backbone modification: 5'-phosphorothioate; note = thymine; note = sugar modification: 2'-O-methoxyethylribose
  modified_base 2: mod_base = OTHER; note = backbone modification: 5'-phosphorothioate; note = sugar modification: 2'-O-methoxyethylribose
  modified_base 3: mod_base = OTHER; note = backbone modification: 5'-phosphorothioate; note = sugar modification: 2'-O-methoxyethylribose; note = thymine
  modified_base 4: mod_base = OTHER; note = backbone modification: 5'-phosphorothioate; note = thymine; note = sugar modification: 2'-O-methoxyethylribose
  modified_base 5: mod_base = m5c; mod_base = OTHER; note = backbone modification: 5'-phosphorothioate; note = sugar modification: 2'-O-methoxyethylribose
  modified_base 6: mod_base = OTHER; note = backbone modification: 5'-phosphorothioate
  modified_base 7: mod_base = OTHER; note = backbone modification: 5'-phosphorothioate
  modified_base 8: mod_base = OTHER; note = backbone modification: 5'-phosphorothioate
  modified_base 9: mod_base = OTHER; note = backbone modification: 5'-phosphorothioate
  modified_base 10: mod_base = OTHER; note = backbone modification: 5'-phosphorothioate
  modified_base 11: mod_base = OTHER; note = backbone modification: 5'-phosphorothioate
  modified_base 12: mod_base = OTHER; note = backbone modification: 5'-phosphorothioate
  modified_base 13: mod_base = OTHER; note = backbone modification: 5'-phosphorothioate
  modified_base 14: mod_base = m5c; mod_base = OTHER; note = sugar modification: 2'-O-methoxyethylribose; note = backbone modification: 5'-phosphorothioate
  modified_base 15: mod_base = OTHER; note = sugar modification: 2'-O-methoxyethylribose; note = backbone modification: 5'-phosphorothioate
  modified_base 16: mod_base = OTHER; note = backbone modification: 5'-phosphorothioate; note = sugar modification: 2'-O-methoxyethylribose; note = thymine
  modified_base 17: mod_base = m5c; mod_base = OTHER; note = backbone modification: 5'-phosphorothioate; note = sugar modification: 2'-O-methoxyethylribose
  modified_base 18: mod_base = m5c; mod_base = OTHER; note = sugar modification: 2'-O-methoxyethylribose
tgttcttgtacttcatcc

SEQ ID NO: 1153 - RNA, 18 nt, synthetic construct
  source 1..18: mol_type = other RNA; note = Antisense oligonucleotide
  modified_base 1: mod_base = OTHER; note = thymine; note = backbone modification: 5'-phosphorothioate; note = sugar modification: 2'-O-methoxyethylribose
  modified_base 2: mod_base = OTHER; note = backbone modification: 5'-phosphorothioate; note = sugar modification: 2'-O-methoxyethylribose
  modified_base 3: mod_base = OTHER; note = thymine; note = sugar modification: 2'-O-methoxyethylribose; note = backbone modification: 5'-phosphorothioate
  modified_base 4: mod_base = OTHER; note = thymine; note = sugar modification: 2'-O-methoxyethylribose; note = backbone modification: 5'-phosphorothioate
  modified_base 5: mod_base = OTHER; mod_base = m5c; note = backbone modification: 5'-phosphorothioate; note = sugar modification: 2'-O-methoxyethylribose
  modified_base 6: mod_base = OTHER; note = thymine; note = backbone modification: 5'-phosphorothioate; note = sugar modification: 2'-O-methoxyethylribose
  modified_base 7: mod_base = OTHER; note = backbone modification: 5'-phosphorothioate
  modified_base 8: mod_base = OTHER; note = backbone modification: 5'-phosphorothioate
  modified_base 9: mod_base = OTHER; note = backbone modification: 5'-phosphorothioate
  modified_base 10: mod_base = OTHER; note = backbone modification: 5'-phosphorothioate
  modified_base 11: mod_base = OTHER; note = backbone modification: 5'-phosphorothioate
  modified_base 12: mod_base = OTHER; note = backbone modification: 5'-phosphorothioate
  modified_base 13: mod_base = OTHER; note = backbone modification: 5'-phosphorothioate; note = thymine; note = sugar modification: 2'-O-methoxyethylribose
  modified_base 14: mod_base = OTHER; mod_base = m5c; note = sugar modification: 2'-O-methoxyethylribose; note = backbone modification: 5'-phosphorothioate
  modified_base 15: mod_base = OTHER; note = backbone modification: 5'-phosphorothioate; note = sugar modification: 2'-O-methoxyethylribose
  modified_base 16: mod_base = OTHER; note = sugar modification: 2'-O-methoxyethylribose; note = backbone modification: 5'-phosphorothioate; note = thymine
  modified_base 17: mod_base = OTHER; mod_base = m5c; note = backbone modification: 5'-phosphorothioate; note = sugar modification: 2'-O-methoxyethylribose
  modified_base 18: mod_base = m5c; mod_base = OTHER; note = sugar modification: 2'-O-methoxyethylribose
tgttcttgtacttcatcc

SEQ ID NO: 1154 - RNA, 18 nt, synthetic construct
  source 1..18: mol_type = other RNA; note = Antisense oligonucleotide
  modified_base 1: mod_base = OTHER; note = thymine; note = sugar modification: 2'-O-methoxyethylribose; note = backbone modification: 5'-phosphorothioate
  modified_base 2: mod_base = OTHER; note = backbone modification: 5'-phosphorothioate; note = sugar modification: 2'-O-methoxyethylribose
  modified_base 3: mod_base = OTHER; note = sugar modification: 2'-O-methoxyethylribose; note = thymine; note = backbone modification: 5'-phosphorothioate
  modified_base 4: mod_base = OTHER; note = sugar modification: 2'-O-methoxyethylribose; note = thymine; note = backbone modification: 5'-phosphorothioate
  modified_base 5: mod_base = OTHER; mod_base = m5c; note = sugar modification: 2'-O-methoxyethylribose; note = backbone modification: 5'-phosphorothioate
  modified_base 6: mod_base = OTHER; note = sugar modification: 2'-O-methoxyethylribose; note = thymine; note = backbone modification: 5'-phosphorothioate
  modified_base 7: mod_base = OTHER; note = thymine; note = sugar modification: 2'-O-methoxyethylribose; note = backbone modification: 5'-phosphorothioate
  modified_base 8: mod_base = OTHER; note = backbone modification: 5'-phosphorothioate
  modified_base 9: mod_base = OTHER; note = backbone modification: 5'-phosphorothioate
  modified_base 10: mod_base = OTHER; note = backbone modification: 5'-phosphorothioate
  modified_base 11: mod_base = OTHER; note = backbone modification: 5'-phosphorothioate
  modified_base 12: mod_base = OTHER; note = backbone modification: 5'-phosphorothioate; note = sugar modification: 2'-O-methoxyethylribose; note = thymine
  modified_base 13: mod_base = OTHER; note = backbone modification: 5'-phosphorothioate; note = thymine; note = sugar modification: 2'-O-methoxyethylribose
  modified_base 14: mod_base = m5c; mod_base = OTHER; note = sugar modification: 2'-O-methoxyethylribose; note = backbone modification: 5'-phosphorothioate
  modified_base 15: mod_base = OTHER; note = sugar modification: 2'-O-methoxyethylribose; note = backbone modification: 5'-phosphorothioate
  modified_base 16: mod_base = OTHER; note = backbone modification: 5'-phosphorothioate; note = thymine; note = sugar modification: 2'-O-methoxyethylribose
  modified_base 17: mod_base = m5c; mod_base = OTHER; note = sugar modification: 2'-O-methoxyethylribose; note = backbone modification: 5'-phosphorothioate
  modified_base 18: mod_base = m5c; mod_base = OTHER; note = sugar modification: 2'-O-methoxyethylribose
tgttcttgtacttcatcc

SEQ ID NO: 1155 - RNA, 18 nt, synthetic construct
  source 1..18: mol_type = other RNA; note = Antisense oligonucleotide
  modified_base 1: mod_base = OTHER; note = sugar modification: 2'-O-methoxyethylribose; note = backbone modification: 5'-phosphorothioate; note = thymine
  modified_base 2: mod_base = OTHER; note = backbone modification: 5'-phosphorothioate; note = sugar modification: 2'-O-methoxyethylribose
  modified_base 3: mod_base = OTHER; note = sugar modification: 2'-O-methoxyethylribose; note = backbone modification: 5'-phosphorothioate; note = thymine
  modified_base 4: mod_base = OTHER; note = backbone modification: 5'-phosphorothioate; note = sugar modification: 2'-O-methoxyethylribose; note = thymine
  modified_base 5: mod_base = OTHER; mod_base = m5c; note = sugar modification: 2'-O-methoxyethylribose; note = backbone modification: 5'-phosphorothioate
  modified_base 6: mod_base = OTHER; note = thymine; note = backbone modification: 5'-phosphorothioate; note = sugar modification: 2'-O-methoxyethylribose
  modified_base 7: mod_base = OTHER; note = backbone modification: 5'-phosphorothioate; note = thymine; note = sugar modification: 2'-O-methoxyethylribose
  modified_base 8: mod_base = OTHER; note = backbone modification: 5'-phosphorothioate; note = sugar modification: 2'-O-methoxyethylribose
  modified_base 9: mod_base = OTHER; note = backbone modification: 5'-phosphorothioate
  modified_base 10: mod_base = OTHER; note = backbone modification: 5'-phosphorothioate
  modified_base 11: mod_base = m5c; mod_base = OTHER; note = backbone modification: 5'-phosphorothioate; note = sugar modification: 2'-O-methoxyethylribose
  modified_base 12: mod_base = OTHER; note = backbone modification: 5'-phosphorothioate; note = thymine; note = sugar modification: 2'-O-methoxyethylribose
  modified_base 13: mod_base = OTHER; note = backbone modification: 5'-phosphorothioate; note = sugar modification: 2'-O-methoxyethylribose; note = thymine
  modified_base 14: mod_base = OTHER; mod_base = m5c; note = backbone modification: 5'-phosphorothioate; note = sugar modification: 2'-O-methoxyethylribose
  modified_base 15: mod_base = OTHER; note = backbone modification: 5'-phosphorothioate; note = sugar modification: 2'-O-methoxyethylribose
  modified_base 16: mod_base = OTHER; note = thymine; note = backbone modification: 5'-phosphorothioate; note = sugar modification: 2'-O-methoxyethylribose
  modified_base 17: mod_base = OTHER; mod_base = m5c; note = backbone modification: 5'-phosphorothioate; note = sugar modification: 2'-O-methoxyethylribose
  modified_base 18: mod_base = m5c; mod_base = OTHER; note = sugar modification: 2'-O-methoxyethylribose
tgttcttgtacttcatcc

SEQ ID NO: 1156 - RNA, 18 nt, synthetic construct
  source 1..18: mol_type = other RNA; note = Antisense oligonucleotide
  modified_base 1: mod_base = OTHER; note = backbone modification: 5'-phosphorothioate; note = thymine; note = sugar modification: 2'-O-methoxyethylribose
  modified_base 2: mod_base = OTHER; note = backbone modification: 5'-phosphorothioate; note = sugar modification: 2'-O-methoxyethylribose
  modified_base 3: mod_base = OTHER; note = thymine; note = backbone modification: 5'-phosphorothioate; note = sugar modification: 2'-O-methoxyethylribose
  modified_base 4: mod_base = OTHER; note = thymine; note = sugar modification: 2'-O-methoxyethylribose; note = backbone modification: 5'-phosphorothioate
  modified_base 5: mod_base = OTHER; mod_base = m5c; note = sugar modification: 2'-O-methoxyethylribose; note = backbone modification: 5'-phosphorothioate
  modified_base 6: mod_base = OTHER; note = backbone modification: 5'-phosphorothioate; note = thymine; note = sugar modification: 2'-O-methoxyethylribose
  modified_base 7: mod_base = OTHER; note = thymine; note = sugar modification: 2'-O-methoxyethylribose; note = backbone modification: 5'-phosphorothioate
  modified_base 8: mod_base = OTHER; note = sugar modification: lna; note = backbone modification: 5'-phosphorothioate
  modified_base 9: mod_base = OTHER; note = backbone modification: 5'-phosphorothioate; note = thymine; note = sugar modification: lna
  modified_base 10: mod_base = OTHER; note = backbone modification: 5'-phosphorothioate; note = sugar modification: lna
  modified_base 11: mod_base = OTHER; mod_base = m5c; note = sugar modification: lna; note = backbone modification: 5'-phosphorothioate
  modified_base 12: mod_base = OTHER; note = backbone modification: 5'-phosphorothioate; note = sugar modification: 2'-O-methoxyethylribose; note = thymine
  modified_base 13: mod_base = OTHER; note = thymine; note = sugar modification: 2'-O-methoxyethylribose; note = backbone modification: 5'-phosphorothioate
  modified_base 14: mod_base = m5c; mod_base = OTHER; note = backbone modification: 5'-phosphorothioate; note = sugar modification: 2'-O-methoxyethylribose
  modified_base 15: mod_base = OTHER; note = sugar modification: 2'-O-methoxyethylribose; note = backbone modification: 5'-phosphorothioate
  modified_base 16: mod_base = OTHER; note = backbone modification: 5'-phosphorothioate; note = thymine; note = sugar modification: 2'-O-methoxyethylribose
  modified_base 17: mod_base = m5c; mod_base = OTHER; note = backbone modification: 5'-phosphorothioate; note = sugar modification: 2'-O-methoxyethylribose
  modified_base 18: mod_base = m5c; mod_base = OTHER; note = sugar modification: 2'-O-methoxyethylribose
tgttcttgtacttcatcc

SEQ ID NO: 1157 - RNA, 18 nt, synthetic construct
  source 1..18: mol_type = other RNA; note = Antisense oligonucleotide
  modified_base 1: mod_base = OTHER; note = sugar modification: lna; note = backbone modification: 5'-phosphorothioate; note = thymine
  modified_base 2: mod_base = OTHER; note = sugar modification: lna; note = backbone modification: 5'-phosphorothioate
  modified_base 3: mod_base = OTHER; note = backbone modification: 5'-phosphorothioate; note = sugar modification: 2'-O-methoxyethylribose; note = thymine
  modified_base 4: mod_base = OTHER; note = backbone modification: 5'-phosphorothioate; note = sugar modification: 2'-O-methoxyethylribose; note = thymine
  modified_base 5: mod_base = m5c; mod_base = OTHER; note = sugar modification: 2'-O-methoxyethylribose; note = backbone modification: 5'-phosphorothioate
  modified_base 6: mod_base = OTHER; note = sugar modification: 2'-O-methoxyethylribose; note = thymine; note = backbone modification: 5'-phosphorothioate
  modified_base 7: mod_base = OTHER; note = thymine; note = backbone modification: 5'-phosphorothioate; note = sugar modification: 2'-O-methoxyethylribose
  modified_base 8: mod_base = OTHER; note = backbone modification: 5'-phosphorothioate; note = sugar modification: lna
  modified_base 9: mod_base = OTHER; note = sugar modification: lna; note = backbone modification: 5'-phosphorothioate; note = thymine
  modified_base 10: mod_base = OTHER; note = sugar modification: lna; note = backbone modification: 5'-phosphorothioate
  modified_base 11: mod_base = m5c; mod_base = OTHER; note = backbone modification: 5'-phosphorothioate; note = sugar modification: lna
  modified_base 12: mod_base = OTHER; note = backbone modification: 5'-phosphorothioate; note = sugar modification: 2'-O-methoxyethylribose; note = thymine
  modified_base 13: mod_base = OTHER; note = thymine; note = backbone modification: 5'-phosphorothioate; note = sugar modification: 2'-O-methoxyethylribose
  modified_base 14: mod_base = OTHER; mod_base = m5c; note = backbone modification: 5'-phosphorothioate; note = sugar modification: 2'-O-methoxyethylribose
  modified_base 15: mod_base = OTHER; note = backbone modification: 5'-phosphorothioate; note = sugar modification: 2'-O-methoxyethylribose
  modified_base 16: mod_base = OTHER; note = backbone modification: 5'-phosphorothioate; note = sugar modification: 2'-O-methoxyethylribose; note = thymine
  modified_base 17: mod_base = OTHER; mod_base = m5c; note = backbone modification: 5'-phosphorothioate; note = sugar modification: lna
  modified_base 18: mod_base = OTHER; mod_base = m5c; note = sugar modification: lna
tgttcttgtacttcatcc

SEQ ID NO: 1158 - RNA, 18 nt, synthetic construct
  source 1..18: mol_type = other RNA; note = Antisense oligonucleotide
  modified_base 1: mod_base = OTHER; note = backbone modification: 5'-phosphorothioate
  modified_base 2: mod_base = OTHER; note = backbone modification: 5'-phosphorothioate
  modified_base 3: mod_base = OTHER; note = backbone modification: 5'-phosphorothioate
  modified_base 4: mod_base = OTHER; note = backbone modification: 5'-phosphorothioate
  modified_base 5: mod_base = OTHER; note = backbone modification: 5'-phosphorothioate
  modified_base 6: mod_base = OTHER; note = backbone modification: 5'-phosphorothioate
  modified_base 7: mod_base = OTHER; note = backbone modification: 5'-phosphorothioate
  modified_base 8: mod_base = OTHER; note = backbone modification: 5'-phosphorothioate; note = sugar modification: lna
  modified_base 9: mod_base = OTHER; note = sugar modification: lna; note = thymine; note = backbone modification: 5'-phosphorothioate
  modified_base 10: mod_base = OTHER; note = backbone modification: 5'-phosphorothioate; note = sugar modification: lna
  modified_base 11: mod_base = m5c; mod_base = OTHER; note = sugar modification: lna; note = backbone modification: 5'-phosphorothioate
  modified_base 12: mod_base = OTHER; note = backbone modification: 5'-phosphorothioate
  modified_base 13: mod_base = OTHER; note = backbone modification: 5'-phosphorothioate
  modified_base 14: mod_base = OTHER; note = backbone modification: 5'-phosphorothioate
  modified_base 15: mod_base = OTHER; note = backbone modification: 5'-phosphorothioate
  modified_base 16: mod_base = OTHER; note = backbone modification: 5'-phosphorothioate
  modified_base 17: mod_base = OTHER; note = backbone modification: 5'-phosphorothioate
tgttcttgtacttcatcc

SEQ ID NO: 1159 - RNA, 18 nt, synthetic construct
  source 1..18: mol_type = other RNA; note = Antisense oligonucleotide
  modified_base 1: mod_base = OTHER; note = backbone modification: 5'-phosphorothioate; note = thymine; note = sugar modification: lna
  modified_base 2: mod_base = OTHER; note = sugar modification: lna; note = backbone modification: 5'-phosphorothioate
  modified_base 3: mod_base = OTHER; note = backbone modification: 5'-phosphorothioate
  modified_base 4: mod_base = OTHER; note = backbone modification: 5'-phosphorothioate
  modified_base 5: mod_base = OTHER; note = backbone modification: 5'-phosphorothioate
  modified_base 6: mod_base = OTHER; note = backbone modification: 5'-phosphorothioate
  modified_base 7: mod_base = OTHER; note = backbone modification: 5'-phosphorothioate
  modified_base 8: mod_base = OTHER; note = backbone modification: 5'-phosphorothioate; note = sugar modification: 2'-O-methoxyethylribose
  modified_base 9: mod_base = OTHER; note = thymine; note = sugar modification: 2'-O-methoxyethylribose; note = backbone modification: 5'-phosphorothioate
  modified_base 10: mod_base = OTHER; note = backbone modification: 5'-phosphorothioate; note = sugar modification: 2'-O-methoxyethylribose
  modified_base 11: mod_base = m5c; mod_base = OTHER; note = sugar modification: 2'-O-methoxyethylribose; note = backbone modification: 5'-phosphorothioate
  modified_base 12: mod_base = OTHER; note = backbone modification: 5'-phosphorothioate
  modified_base 13: mod_base = OTHER; note = backbone modification: 5'-phosphorothioate
  modified_base 14: mod_base = OTHER; note = backbone modification: 5'-phosphorothioate
  modified_base 15: mod_base = OTHER; note = backbone modification: 5'-phosphorothioate
  modified_base 16: mod_base = OTHER; note = backbone modification: 5'-phosphorothioate
  modified_base 17: mod_base = m5c; mod_base = OTHER; note = sugar modification: lna; note = backbone modification: 5'-phosphorothioate
  modified_base 18: mod_base = m5c; mod_base = OTHER; note = sugar modification: lna
tgttcttgtacttcatcc

SEQ ID NO: 1160 - RNA, 18 nt, synthetic construct
  source 1..18: mol_type = other RNA; note = Antisense oligonucleotide
  modified_base 1: mod_base = OTHER; note = thymine; note = sugar modification: lna; note = backbone modification: 5'-phosphorothioate
  modified_base 2: mod_base = OTHER; note = sugar modification: lna; note = backbone modification: 5'-phosphorothioate
  modified_base 3: mod_base = OTHER; note = backbone modification: 5'-phosphorothioate
  modified_base 4: mod_base = OTHER; note = backbone modification: 5'-phosphorothioate
  modified_base 5: mod_base = OTHER; note = backbone modification: 5'-phosphorothioate
  modified_base 6: mod_base = OTHER; note = backbone modification: 5'-phosphorothioate
  modified_base 7: mod_base = OTHER; note = backbone modification: 5'-phosphorothioate
  modified_base 8: mod_base = OTHER; note = backbone modification: 5'-phosphorothioate; note = sugar modification: lna
  modified_base 9: mod_base = OTHER; note = backbone modification: 5'-phosphorothioate; note = thymine; note = sugar modification: lna
  modified_base 10: mod_base = OTHER; note = backbone modification: 5'-phosphorothioate; note = sugar modification: lna
  modified_base 11: mod_base = OTHER; mod_base = m5c; note = backbone modification: 5'-phosphorothioate; note = sugar modification: lna
  modified_base 12: mod_base = OTHER; note = backbone modification: 5'-phosphorothioate
  modified_base 13: mod_base = OTHER; note = backbone modification: 5'-phosphorothioate
  modified_base 14: mod_base = OTHER; note = backbone modification: 5'-phosphorothioate
  modified_base 15: mod_base = OTHER; note = backbone modification: 5'-phosphorothioate
  modified_base 16: mod_base = OTHER; note = backbone modification: 5'-phosphorothioate
  modified_base 17: mod_base = m5c; mod_base = OTHER; note = sugar modification: lna; note = backbone modification: 5'-phosphorothioate
  modified_base 18: mod_base = OTHER; mod_base = m5c; note = sugar modification: lna
tgttcttgtacttcatcc

SEQ ID NO: 1161 - RNA, 18 nt, synthetic construct
  source 1..18: mol_type = other RNA; note = Antisense oligonucleotide
  modified_base 1: mod_base = OTHER; note = sugar modification: lna; note = thymine; note = backbone modification: 5'-phosphorothioate
  modified_base 2: mod_base = OTHER; note = backbone modification: 5'-phosphorothioate; note = sugar modification: lna
  modified_base 3: mod_base = OTHER; note = thymine; note = backbone modification: 5'-phosphorothioate; note = sugar modification: 2'-O-methoxyethylribose
  modified_base 4: mod_base = OTHER; note = backbone modification: 5'-phosphorothioate; note = thymine; note = sugar modification: 2'-O-methoxyethylribose
  modified_base 5: mod_base = OTHER; mod_base = m5c; note = backbone modification: 5'-phosphorothioate; note = sugar modification: 2'-O-methoxyethylribose
  modified_base 6: mod_base = OTHER; note = sugar modification: 2'-O-methoxyethylribose; note = thymine; note = backbone modification: 5'-phosphorothioate
  modified_base 7: mod_base = OTHER; note = backbone modification: 5'-phosphorothioate; note = sugar modification: 2'-O-methoxyethylribose; note = thymine
  modified_base 8: mod_base = OTHER; note = backbone modification: 5'-phosphorothioate
  modified_base 9: mod_base = OTHER; note = backbone modification: 5'-phosphorothioate
  modified_base 10: mod_base = OTHER; note = backbone modification: 5'-phosphorothioate
  modified_base 11: mod_base = OTHER; note = backbone modification: 5'-phosphorothioate
  modified_base 12: mod_base = OTHER; note = backbone modification: 5'-phosphorothioate; note = thymine; note = sugar modification: 2'-O-methoxyethylribose
  modified_base 13: mod_base = OTHER; note = sugar modification: 2'-O-methoxyethylribose; note = backbone modification: 5'-phosphorothioate; note = thymine
  modified_base 14: mod_base = OTHER; mod_base = m5c; note = sugar modification: 2'-O-methoxyethylribose; note = backbone modification: 5'-phosphorothioate
  modified_base 15: mod_base = OTHER; note = backbone modification: 5'-phosphorothioate; note = sugar modification: 2'-O-methoxyethylribose
  modified_base 16: mod_base = OTHER; note = sugar modification: 2'-O-methoxyethylribose; note = backbone modification: 5'-phosphorothioate; note = thymine
  modified_base 17: mod_base = OTHER; mod_base = m5c; note = backbone modification: 5'-phosphorothioate; note = sugar modification: lna
  modified_base 18: mod_base = m5c; mod_base = OTHER; note = sugar modification: lna
tgttcttgtacttcatcc

SEQ ID NO: 1162 - RNA, 16 nt, synthetic construct
  source 1..16: mol_type = other RNA; note = Antisense oligonucleotide
  modified_base 1: mod_base = OTHER; note = backbone modification: 5'-phosphorothioate; note = sugar modification: 2'-O-methoxyethylribose
  modified_base 2: mod_base = OTHER; note = backbone modification: 5'-phosphorothioate; note = sugar modification: 2'-O-methoxyethylribose
  modified_base 3: mod_base = OTHER; note = backbone modification: 5'-phosphorothioate; note = sugar modification: 2'-O-methoxyethylribose; note = thymine
  modified_base 4: mod_base = OTHER; note = backbone modification: 5'-phosphorothioate; note = sugar modification: 2'-O-methoxyethylribose
  modified_base 5: mod_base = OTHER; note = backbone modification: 5'-phosphorothioate; note = sugar modification: 2'-O-methoxyethylribose; note = thymine
  modified_base 6: mod_base = OTHER; note = thymine; note = sugar modification: 2'-O-methoxyethylribose; note = backbone modification: 5'-phosphorothioate
  modified_base 7: mod_base = OTHER; mod_base = m5c; note = backbone modification: 5'-phosphorothioate; note = sugar modification: 2'-O-methoxyethylribose
  modified_base 8: mod_base = OTHER; note = sugar modification: 2'-O-methoxyethylribose; note = backbone modification: 5'-phosphorothioate; note = thymine
  modified_base 9: mod_base = OTHER; note = sugar modification: 2'-O-methoxyethylribose; note = backbone modification: 5'-phosphorothioate; note = thymine
  modified_base 10: mod_base = OTHER; note = backbone modification: 5'-phosphorothioate
  modified_base 11: mod_base = OTHER; note = backbone modification: 5'-phosphorothioate
  modified_base 12: mod_base = OTHER; note = backbone modification: 5'-phosphorothioate
  modified_base 13: mod_base = OTHER; note = backbone modification: 5'-phosphorothioate
  modified_base 14: mod_base = OTHER; note = thymine; note = sugar modification: 2'-O-methoxyethylribose; note = backbone modification: 5'-phosphorothioate
  modified_base 15: mod_base = OTHER; note = sugar modification: 2'-O-methoxyethylribose; note = thymine; note = backbone modification: 5'-phosphorothioate
  modified_base 16: mod_base = m5c; mod_base = OTHER; note = sugar modification: 2'-O-methoxyethylribose
ggtgttcttgtacttc

SEQ ID NO: 1163 - RNA, 16 nt, synthetic construct
  source 1..16: mol_type = other RNA; note = Antisense oligonucleotide
  modified_base 1: mod_base = OTHER; note = sugar modification: lna; note = backbone modification: 5'-phosphorothioate
  modified_base 2: mod_base = OTHER; note = backbone modification: 5'-phosphorothioate; note = sugar modification: 2'-O-methoxyethylribose
  modified_base 3: mod_base = OTHER; note = thymine; note = backbone modification: 5'-phosphorothioate; note = sugar modification: 2'-O-methoxyethylribose
  modified_base 4: mod_base = OTHER; note = backbone modification: 5'-phosphorothioate; note = sugar modification: 2'-O-methoxyethylribose
  modified_base 5: mod_base = OTHER; note = thymine; note = sugar modification: 2'-O-methoxyethylribose; note = backbone modification: 5'-phosphorothioate
  modified_base 6: mod_base = OTHER; note = backbone modification: 5'-phosphorothioate; note = thymine; note = sugar modification: 2'-O-methoxyethylribose
  modified_base 7: mod_base = OTHER; mod_base = m5c; note = sugar modification: 2'-O-methoxyethylribose; note = backbone modification: 5'-phosphorothioate
  modified_base 8: mod_base = OTHER; note = backbone modification: 5'-phosphorothioate; note = thymine; note = sugar modification: 2'-O-methoxyethylribose
  modified_base 9: mod_base = OTHER; note = backbone modification: 5'-phosphorothioate; note = thymine; note = sugar modification: 2'-O-methoxyethylribose
  modified_base 10: mod_base = OTHER; note = backbone modification: 5'-phosphorothioate
  modified_base 11: mod_base = OTHER; note = backbone modification: 5'-phosphorothioate
  modified_base 12: mod_base = OTHER; note = backbone modification: 5'-phosphorothioate
  modified_base 13: mod_base = OTHER; note = backbone modification: 5'-phosphorothioate
  modified_base 14: mod_base = OTHER; note = backbone modification: 5'-phosphorothioate; note = sugar modification: 2'-O-methoxyethylribose; note = thymine
  modified_base 15: mod_base = OTHER; note = sugar modification: 2'-O-methoxyethylribose; note = backbone modification: 5'-phosphorothioate; note = thymine
  modified_base 16: mod_base = OTHER; mod_base = m5c; note = sugar modification: lna
ggtgttcttgtacttc

SEQ ID NO: 1164 - RNA, 16 nt, synthetic construct
  source 1..16: mol_type = other RNA; note = Antisense oligonucleotide
  modified_base 1: mod_base = OTHER; note = backbone modification: 5'-phosphorothioate; note = sugar modification: 2'-O-methoxyethylribose; note = thymine
  modified_base 2: mod_base = OTHER; note = backbone modification: 5'-phosphorothioate; note = sugar modification: 2'-O-methoxyethylribose
  modified_base 3: mod_base = OTHER; note = backbone modification: 5'-phosphorothioate; note = sugar modification: 2'-O-methoxyethylribose; note = thymine
  modified_base 4: mod_base = OTHER; note = backbone modification: 5'-phosphorothioate; note = sugar modification: 2'-O-methoxyethylribose; note = thymine
  modified_base 5: mod_base = OTHER; mod_base = m5c; note = backbone modification: 5'-phosphorothioate; note = sugar modification: 2'-O-methoxyethylribose
  modified_base 6: mod_base = OTHER; note = thymine; note = sugar modification: 2'-O-methoxyethylribose; note = backbone modification: 5'-phosphorothioate
  modified_base 7: mod_base = OTHER; note = backbone modification: 5'-phosphorothioate; note = thymine; note = sugar modification: 2'-O-methoxyethylribose
  modified_base 8: mod_base = OTHER; note = backbone modification: 5'-phosphorothioate
  modified_base 9: mod_base = OTHER; note = backbone modification: 5'-phosphorothioate
  modified_base 10: mod_base = OTHER; note = backbone modification: 5'-phosphorothioate
  modified_base 11: mod_base = OTHER; note = backbone modification: 5'-phosphorothioate
  modified_base 12: mod_base = OTHER; note = sugar modification: 2'-O-methoxyethylribose; note = thymine; note = backbone modification: 5'-phosphorothioate
  modified_base 13: mod_base = OTHER; note = backbone modification: 5'-phosphorothioate; note = sugar modification: 2'-O-methoxyethylribose; note = thymine
  modified_base 14: mod_base = OTHER; mod_base = m5c; note = sugar modification: 2'-O-methoxyethylribose; note = backbone modification: 5'-phosphorothioate
  modified_base 15: mod_base = OTHER; note = sugar modification: 2'-O-methoxyethylribose; note = backbone modification: 5'-phosphorothioate
  modified_base 16: mod_base = OTHER; note = sugar modification: 2'-O-methoxyethylribose; note = thymine
tgttcttgtacttcat

SEQ ID NO: 1165 - RNA, 18 nt, synthetic construct
  source 1..18: mol_type = other RNA; note = Antisense oligonucleotide
  modified_base 1: mod_base = OTHER; note = sugar modification: 2'-O-methoxyethylribose; note = backbone modification: 5'-phosphorothioate; note = thymine
  modified_base 2: mod_base = OTHER; note = sugar modification: 2'-O-methoxyethylribose; note = backbone modification: 5'-phosphorothioate
  modified_base 3: mod_base = OTHER; note = backbone modification: 5'-phosphorothioate; note = thymine; note = sugar modification: 2'-O-methoxyethylribose
  modified_base 4: mod_base = OTHER; note = sugar modification: 2-fluororibose; note = thymine; note = backbone modification: 5'-phosphorothioate
  modified_base 5: mod_base = m5c; mod_base = OTHER; note = sugar modification: 2'-O-methoxyethylribose; note = backbone modification: 5'-phosphorothioate
  modified_base 6: mod_base = OTHER; note = thymine; note = backbone modification: 5'-phosphorothioate; note = sugar modification: 2'-O-methoxyethylribose
  modified_base 7: mod_base = OTHER; note = sugar modification: 2'-O-methoxyethylribose; note = thymine; note = backbone modification: 5'-phosphorothioate
  modified_base 8: mod_base = OTHER; note = backbone modification: 5'-phosphorothioate; note = sugar modification: 2'-O-methoxyethylribose
  modified_base 9: mod_base = OTHER; note = sugar modification: 2-fluororibose; note = backbone modification: 5'-phosphorothioate; note = thymine
  modified_base 10: mod_base = OTHER; note = sugar modification: 2-fluororibose; note = backbone modification: 5'-phosphorothioate
  modified_base 11: mod_base = m5c; mod_base = OTHER; note = backbone modification: 5'-phosphorothioate; note = sugar modification: 2'-O-methoxyethylribose
  modified_base 12: mod_base = OTHER; note = backbone modification: 5'-phosphorothioate; note = thymine; note = sugar modification: 2'-O-methoxyethylribose
  modified_base 13: mod_base = OTHER; note = backbone modification: 5'-phosphorothioate; note = sugar modification: 2'-O-methoxyethylribose; note = thymine
  modified_base 14: mod_base = OTHER; mod_base = m5c; note = backbone modification: 5'-phosphorothioate; note = sugar modification: 2'-O-methoxyethylribose
  modified_base 15: mod_base = OTHER; note = backbone modification: 5'-phosphorothioate; note = sugar modification: 2-fluororibose
  modified_base 16: mod_base = OTHER; note = sugar modification: 2'-O-methoxyethylribose; note = backbone modification: 5'-phosphorothioate; note = thymine
  modified_base 17: mod_base = OTHER; mod_base = m5c; note = sugar modification: 2'-O-methoxyethylribose; note = backbone modification: 5'-phosphorothioate
  modified_base 18: mod_base = OTHER; mod_base = m5c; note = sugar modification: 2'-O-methoxyethylribose
tgttcttgtacttcatcc

SEQ ID NO: 1166 - RNA, 18 nt, synthetic construct
  source 1..18: mol_type = other RNA; note = Antisense oligonucleotide
  modified_base 1: mod_base = OTHER; note = backbone modification: 5'-phosphorothioate; note = sugar modification: 2'-O-methoxyethylribose; note = thymine
  modified_base 2: mod_base = OTHER; note = sugar modification: 2'-O-methoxyethylribose; note = backbone modification: 5'-phosphorothioate
  modified_base 3: mod_base = OTHER; note = thymine; note = sugar modification: 2'-O-methoxyethylribose; note = backbone modification: 5'-phosphorothioate
  modified_base 4: mod_base = OTHER; note = thymine; note = backbone modification: 5'-phosphorothioate; note = sugar modification: 2-fluororibose
  modified_base 5: mod_base = OTHER; mod_base = m5c; note = sugar modification: 2-fluororibose; note = backbone modification: 5'-phosphorothioate
  modified_base 6: mod_base = OTHER; note = backbone modification: 5'-phosphorothioate; note = sugar modification: 2'-O-methoxyethylribose; note = thymine
  modified_base 7: mod_base = OTHER; note = sugar modification: 2'-O-methoxyethylribose; note = backbone modification: 5'-phosphorothioate; note = thymine
  modified_base 8: mod_base = OTHER; note = sugar modification: 2'-O-methoxyethylribose; note = backbone modification: 5'-phosphorothioate
  modified_base 9: mod_base = OTHER; note = sugar modification: 2-fluororibose; note = backbone modification: 5'-phosphorothioate; note = thymine
  modified_base 10: mod_base = OTHER; note = sugar modification: 2-fluororibose; note = backbone modification: 5'-phosphorothioate
  modified_base 11: mod_base = m5c; mod_base = OTHER; note = sugar modification: 2'-O-methoxyethylribose; note = backbone modification: 5'-phosphorothioate
  modified_base 12: mod_base = OTHER; note = sugar modification: 2'-O-methoxyethylribose; note = thymine; note = backbone modification: 5'-phosphorothioate
  modified_base 13: mod_base = OTHER; note = sugar modification: 2'-O-methoxyethylribose; note = backbone modification: 5'-phosphorothioate; note = thymine
  modified_base 14: mod_base = OTHER; mod_base = m5c; note = sugar modification: 2-fluororibose; note = backbone modification: 5'-phosphorothioate
  modified_base 15: mod_base = OTHER; note = backbone modification: 5'-phosphorothioate; note = sugar modification: 2-fluororibose
  modified_base 16: mod_base = OTHER; note = thymine; note = backbone modification: 5'-phosphorothioate; note = sugar modification: 2'-O-methoxyethylribose
  modified_base 17: mod_base = OTHER; mod_base = m5c; note = backbone modification: 5'-phosphorothioate; note = sugar modification: 2'-O-methoxyethylribose
  modified_base 18: mod_base = m5c; mod_base = OTHER; note = sugar modification: 2'-O-methoxyethylribose
tgttcttgtacttcatcc

SEQ ID NO: 1167 - RNA, 18 nt, synthetic construct
  source 1..18: mol_type = other RNA; note = Antisense oligonucleotide
  modified_base 1: mod_base = OTHER; note = backbone modification: 5'-phosphorothioate; note = thymine; note = sugar modification: 2'-O-methoxyethylribose
  modified_base 2: mod_base = OTHER; note = backbone modification: 5'-phosphorothioate; note = sugar modification: 2'-O-methoxyethylribose
  modified_base 3: mod_base = OTHER; note = backbone modification: 5'-phosphorothioate; note = sugar modification: 2'-O-methoxyethylribose; note = thymine
  modified_base 4: mod_base = OTHER; note = sugar modification: 2-fluororibose; note = backbone modification: 5'-phosphorothioate; note = thymine
  modified_base 5: mod_base = m5c; mod_base = OTHER; note = backbone modification: 5'-phosphorothioate; note = sugar modification: 2-fluororibose
  modified_base 6: mod_base = OTHER; note = thymine; note = sugar modification: 2-fluororibose; note = backbone modification: 5'-phosphorothioate
  modified_base 7: mod_base = OTHER; note = backbone modification: 5'-phosphorothioate; note = thymine; note = sugar modification: 2'-O-methoxyethylribose
  modified_base 8: mod_base = OTHER; note = backbone modification: 5'-phosphorothioate; note = sugar modification: 2'-O-methoxyethylribose
  modified_base 9: mod_base = OTHER; note = thymine; note = sugar modification: 2-fluororibose; note = backbone modification: 5'-phosphorothioate
  modified_base 10: mod_base = OTHER; note = sugar modification: 2-fluororibose; note = backbone modification: 5'-phosphorothioate
  modified_base 11: mod_base = m5c; mod_base = OTHER; note = backbone modification: 5'-phosphorothioate; note = sugar modification: 2'-O-methoxyethylribose
  modified_base 12: mod_base = OTHER; note = sugar modification: 2'-O-methoxyethylribose; note = thymine; note = backbone modification: 5'-phosphorothioate
  modified_base 13: mod_base = OTHER; note = backbone modification: 5'-phosphorothioate; note = thymine; note = sugar modification: 2-fluororibose
  modified_base 14: mod_base = m5c; mod_base = OTHER; note = sugar modification: 2-fluororibose; note = backbone modification: 5'-phosphorothioate
  modified_base 15: mod_base = OTHER; note = backbone modification: 5'-phosphorothioate; note = sugar modification: 2-fluororibose
  modified_base 16: mod_base = OTHER; note = backbone modification: 5'-phosphorothioate; note = thymine; note = sugar modification: 2'-O-methoxyethylribose
  modified_base 17: mod_base = OTHER; mod_base = m5c; note = backbone modification: 5'-phosphorothioate; note = sugar modification: 2'-O-methoxyethylribose
  modified_base 18: mod_base = m5c; mod_base = OTHER; note = sugar modification: 2'-O-methoxyethylribose
tgttcttgtacttcatcc

SEQ ID NO: 1168 - RNA, 18 nt, synthetic construct
  source 1..18: mol_type = other RNA; note = Antisense oligonucleotide
  modified_base 1: mod_base = OTHER; note = sugar modification: 2'-O-methoxyethylribose; note = thymine; note = backbone modification: 5'-phosphorothioate
  modified_base 2: mod_base = OTHER; note = backbone modification: 5'-phosphorothioate; note = sugar modification: 2'-O-methoxyethylribose
  modified_base 3: mod_base = OTHER; note = thymine; note = sugar modification: 2'-O-methoxyethylribose; note = backbone modification: 5'-phosphorothioate
  modified_base 4: mod_base = OTHER; note = sugar modification: 2-fluororibose; note = backbone modification: 5'-phosphorothioate; note = thymine
  modified_base 5: mod_base = m5c; mod_base = OTHER; note = backbone modification: 5'-phosphorothioate; note = sugar modification: 2-fluororibose
  modified_base 6: mod_base = OTHER; note = thymine; note = backbone modification: 5'-phosphorothioate; note = sugar modification: 2-fluororibose
  modified_base 7: mod_base = OTHER; note = sugar modification: 2-fluororibose; note = thymine; note = backbone modification: 5'-phosphorothioate
  modified_base 8: mod_base = OTHER; note = backbone modification: 5'-phosphorothioate; note = sugar modification: 2'-O-methoxyethylribose
  modified_base 9: mod_base = OTHER; note = sugar modification: 2-fluororibose; note = thymine; note = backbone modification: 5'-phosphorothioate
  modified_base 10: mod_base = OTHER; note = sugar modification: 2-fluororibose; note = backbone modification: 5'-phosphorothioate
  modified_base 11: mod_base = m5c; mod_base = OTHER; note = sugar modification: 2'-O-methoxyethylribose; note = backbone modification: 5'-phosphorothioate
  modified_base 12: mod_base = OTHER; note = backbone modification: 5'-phosphorothioate; note = sugar modification: 2-fluororibose; note = thymine
  modified_base 13: mod_base = OTHER; note = sugar modification: 2-fluororibose; note = backbone modification: 5'-phosphorothioate; note = thymine
  modified_base 14: mod_base = OTHER; mod_base = m5c; note = backbone modification: 5'-phosphorothioate; note = sugar modification: 2-fluororibose
  modified_base 15: mod_base = OTHER; note = sugar modification: 2-fluororibose; note = backbone modification: 5'-phosphorothioate
  modified_base 16: mod_base = OTHER; note = sugar modification: 2'-O-methoxyethylribose; note = backbone modification: 5'-phosphorothioate; note = thymine
  modified_base 17: mod_base = m5c; mod_base = OTHER; note = backbone modification: 5'-phosphorothioate; note = sugar modification: 2'-O-methoxyethylribose
  modified_base 18: mod_base = m5c; mod_base = OTHER; note = sugar modification: 2'-O-methoxyethylribose
tgttcttgtacttcatcc

SEQ ID NO: 1169 - RNA, 18 nt, synthetic construct
  source 1..18: mol_type = other RNA; note = Antisense oligonucleotide
  modified_base 1: mod_base = OTHER; note = sugar modification: 2'-O-methoxyethylribose; note = backbone modification: 5'-phosphorothioate; note = thymine
  modified_base 2: mod_base = OTHER; note = sugar modification: 2'-O-methoxyethylribose; note = backbone modification: 5'-phosphorothioate
  modified_base 3: mod_base = OTHER; note = sugar modification: 2-fluororibose; note = backbone modification: 5'-phosphorothioate; note = thymine
  modified_base 4: mod_base = OTHER; note = thymine; note = sugar modification: 2-fluororibose; note = backbone modification: 5'-phosphorothioate
  modified_base 5: mod_base = OTHER; mod_base = m5c; note = sugar modification: 2-fluororibose; note = backbone modification: 5'-phosphorothioate
  modified_base 6: mod_base = OTHER; note = sugar modification: 2-fluororibose; note = thymine; note = backbone modification: 5'-phosphorothioate
  modified_base 7: mod_base = OTHER; note = backbone modification: 5'-phosphorothioate; note = sugar modification: 2-fluororibose; note = thymine
  modified_base 8: mod_base = OTHER; note = sugar modification: 2-fluororibose; note = backbone modification: 5'-phosphorothioate
  modified_base 9: mod_base = OTHER; note = backbone modification: 5'-phosphorothioate; note = sugar modification: 2-fluororibose; note = thymine
  modified_base 10: mod_base = OTHER; note = backbone modification: 5'-phosphorothioate; note = sugar modification: 2-fluororibose
  modified_base 11: mod_base = OTHER; mod_base = m5c; note = sugar modification: 2-fluororibose; note = backbone modification: 5'-phosphorothioate
  modified_base 12: mod_base = OTHER; note = backbone modification: 5'-phosphorothioate; note = sugar modification: 2-fluororibose; note = thymine
  modified_base 13: mod_base = OTHER; note = backbone modification: 5'-phosphorothioate; note = thymine; note = sugar modification: 2-fluororibose
  modified_base 14: mod_base = m5c; mod_base = OTHER; note = sugar modification: 2-fluororibose; note = backbone modification: 5'-phosphorothioate
  modified_base 15: mod_base = OTHER; note = sugar modification: 2-fluororibose; note = backbone modification: 5'-phosphorothioate
  modified_base 16: mod_base = OTHER; note = sugar modification: 2-fluororibose; note = thymine; note = backbone modification: 5'-phosphorothioate
  modified_base 17: mod_base = m5c; mod_base = OTHER; note = backbone modification: 5'-phosphorothioate; note = sugar modification: 2'-O-methoxyethylribose
  modified_base 18: mod_base = OTHER; mod_base = m5c; note = sugar modification: 2'-O-methoxyethylribose
tgttcttgtacttcatcc

SEQ ID NO: 1170 - RNA, 18 nt, synthetic construct
  source 1..18: mol_type = other RNA; note = Antisense oligonucleotide
  modified_base 1: mod_base = OTHER; note = sugar modification: 2'-O-methoxyethylribose; note = thymine; note = backbone modification: 5'-phosphorothioate
  modified_base 2: mod_base = OTHER; note = backbone modification: 5'-phosphorothioate; note = sugar modification: 2'-O-methoxyethylribose
  modified_base 3: mod_base = OTHER; note = backbone modification: 5'-phosphorothioate; note = sugar modification: 2'-O-methoxyethylribose; note = thymine
  modified_base 4: mod_base = OTHER; note = thymine; note = sugar modification: 2-fluororibose; note = backbone modification: 5'-phosphorothioate
  modified_base 5: mod_base = OTHER; mod_base = m5c; note = sugar modification: 2'-O-methoxyethylribose; note = backbone modification: 5'-phosphorothioate
  modified_base 6: mod_base = OTHER; note = backbone modification: 5'-phosphorothioate; note = sugar modification: 2'-O-methoxyethylribose; note = thymine
  modified_base 7: mod_base = OTHER; note = backbone modification: 5'-phosphorothioate; note = sugar modification: 2'-O-methoxyethylribose; note = thymine
  modified_base 8: mod_base = OTHER; note = backbone modification: 5'-phosphorothioate; note = sugar modification: 2'-O-methoxyethylribose
  modified_base 9: mod_base = OTHER; note = sugar modification: 2'-O-methoxyethylribose; note = backbone modification: 5'-phosphorothioate; note = thymine
  modified_base 10: mod_base = OTHER; note = backbone modification: 5'-phosphorothioate; note = sugar modification: 2'-O-methoxyethylribose
  modified_base 11: mod_base = m5c; mod_base = OTHER; note = backbone modification: 5'-phosphorothioate; note = sugar modification: 2'-O-methoxyethylribose
  modified_base 12: mod_base = OTHER; note = thymine; note = backbone modification: 5'-phosphorothioate; note = sugar modification: 2'-O-methoxyethylribose
  modified_base 13: mod_base = OTHER; note = thymine; note = sugar modification: 2'-O-methoxyethylribose; note = backbone modification: 5'-phosphorothioate
  modified_base 14: mod_base = m5c; mod_base = OTHER; note = sugar modification: 2'-O-methoxyethylribose; note = backbone modification: 5'-phosphorothioate
  modified_base 15: mod_base = OTHER; note = backbone modification: 5'-phosphorothioate; note = sugar modification: 2-fluororibose
  modified_base 16: mod_base = OTHER; note = thymine; note = sugar modification: 2'-O-methoxyethylribose; note = backbone modification: 5'-phosphorothioate
  modified_base 17: mod_base = OTHER; mod_base = m5c; note = sugar modification: 2'-O-methoxyethylribose; note = backbone modification: 5'-phosphorothioate
  modified_base 18: mod_base = OTHER; mod_base = m5c; note = sugar modification: 2'-O-methoxyethylribose
tgttcttgtacttcatcc

SEQ ID NO: 1171 - RNA, 18 nt, synthetic construct
  source 1..18: mol_type = other RNA; note = Antisense oligonucleotide
  modified_base 1: mod_base = OTHER; note = sugar modification: 2'-O-methoxyethylribose; note = thymine; note = backbone modification: 5'-phosphorothioate
  modified_base 2: mod_base = OTHER; note = backbone modification: 5'-phosphorothioate; note = sugar modification: 2'-O-methoxyethylribose
  modified_base 3: mod_base = OTHER; note = backbone modification: 5'-phosphorothioate; note = sugar modification: 2'-O-methoxyethylribose; note = thymine
  modified_base 4: mod_base = OTHER; note = backbone modification: 5'-phosphorothioate; note = thymine; note = sugar modification: 2-fluororibose
  modified_base 5: mod_base = OTHER; mod_base = m5c; note = backbone modification: 5'-phosphorothioate; note = sugar modification: 2-fluororibose
  modified_base 6: mod_base = OTHER; note = backbone modification: 5'-phosphorothioate; note = thymine; note = sugar modification: 2'-O-methoxyethylribose
  modified_base 7: mod_base = OTHER; note = sugar modification: 2'-O-methoxyethylribose; note = backbone modification: 5'-phosphorothioate; note = thymine
  modified_base 8: mod_base = OTHER; note = sugar modification: 2'-O-methoxyethylribose; note = backbone modification: 5'-phosphorothioate
  modified_base 9: mod_base = OTHER; note = thymine; note = sugar modification: 2'-O-methoxyethylribose; note = backbone modification: 5'-phosphorothioate
  modified_base 10: mod_base = OTHER; note = sugar modification: 2'-O-methoxyethylribose; note = backbone modification: 5'-phosphorothioate
  modified_base 11: mod_base = m5c; mod_base = OTHER; note = sugar modification: 2'-O-methoxyethylribose; note = backbone modification: 5'-phosphorothioate
  modified_base 12: mod_base = OTHER; note = sugar modification: 2'-O-methoxyethylribose; note = thymine; note = backbone modification: 5'-phosphorothioate
  modified_base 13: mod_base = OTHER; note = backbone modification: 5'-phosphorothioate; note = sugar modification: 2'-O-methoxyethylribose; note = thymine
  modified_base 14: mod_base = OTHER; mod_base = m5c; note = sugar modification: 2-fluororibose; note = backbone modification: 5'-phosphorothioate
  modified_base 15: mod_base = OTHER; note = sugar modification: 2-fluororibose; note = backbone modification: 5'-phosphorothioate
  modified_base 16: mod_base = OTHER; note = backbone modification: 5'-phosphorothioate; note = thymine; note = sugar modification: 2'-O-methoxyethylribose
  modified_base 17: mod_base = m5c; mod_base = OTHER; note = backbone modification: 5'-phosphorothioate; note = sugar modification: 2'-O-methoxyethylribose
  modified_base 18: mod_base = m5c; mod_base = OTHER; note = sugar modification: 2'-O-methoxyethylribose
tgttcttgtacttcatcc

SEQ ID NO: 1172 - RNA, 18 nt, synthetic construct
  source 1..18: mol_type = other RNA; note = Antisense oligonucleotide
  modified_base 1: mod_base = OTHER; note = thymine; note = backbone modification: 5'-phosphorothioate; note = sugar modification: 2'-O-methoxyethylribose
  modified_base 2: mod_base = OTHER; note = backbone modification: 5'-phosphorothioate; note = sugar modification: 2'-O-methoxyethylribose
  modified_base 3: mod_base = OTHER; note = thymine; note = sugar modification: 2'-O-methoxyethylribose; note = backbone modification: 5'-phosphorothioate
  modified_base 4: mod_base = OTHER; note = sugar modification: 2-fluororibose; note = thymine; note = backbone modification: 5'-phosphorothioate
  modified_base 5: mod_base = m5c; mod_base = OTHER; note = sugar modification: 2-fluororibose; note = backbone modification: 5'-phosphorothioate
  modified_base 6: mod_base = OTHER; note = sugar modification: 2-fluororibose; note = backbone modification: 5'-phosphorothioate; note = thymine
  modified_base 7: mod_base = OTHER; note = sugar modification: 2'-O-methoxyethylribose; note = backbone modification: 5'-phosphorothioate; note = thymine
  modified_base 8: mod_base = OTHER; note = sugar modification: 2'-O-methoxyethylribose; note = backbone modification: 5'-phosphorothioate
  modified_base 9: mod_base = OTHER; note = thymine; note = backbone modification: 5'-phosphorothioate; note = sugar modification: 2'-O-methoxyethylribose
  modified_base 10: mod_base = OTHER; note = backbone modification: 5'-phosphorothioate; note = sugar modification: 2'-O-methoxyethylribose
  modified_base 11: mod_base = OTHER; mod_base = m5c; note = backbone modification: 5'-phosphorothioate; note = sugar modification: 2'-O-methoxyethylribose
  modified_base 12: mod_base = OTHER; note = sugar modification: 2'-O-methoxyethylribose; note = backbone modification: 5'-phosphorothioate; note = thymine
  modified_base 13: mod_base = OTHER; note = backbone modification: 5'-phosphorothioate; note = thymine; note = sugar modification: 2-fluororibose
  modified_base 14: mod_base = OTHER; mod_base = m5c; note = backbone modification: 5'-phosphorothioate; note = sugar modification: 2-fluororibose
  modified_base 15: mod_base = OTHER; note = sugar modification: 2-fluororibose; note = backbone modification: 5'-phosphorothioate
  modified_base 16: mod_base = OTHER; note = backbone modification: 5'-phosphorothioate; note = sugar modification: 2'-O-methoxyethylribose; note = thymine
  modified_base 17: mod_base = OTHER; mod_base = m5c; note = sugar modification: 2'-O-methoxyethylribose; note = backbone modification: 5'-phosphorothioate
  modified_base 18: mod_base = m5c; mod_base = OTHER; note = sugar modification: 2'-O-methoxyethylribose
tgttcttgtacttcatcc

SEQ ID NO: 1173 - RNA, 18 nt, synthetic construct
  source 1..18: mol_type = other RNA; note = Antisense oligonucleotide
  modified_base 1: mod_base = OTHER; note = backbone modification: 5'-phosphorothioate; note = thymine; note = sugar modification: 2'-O-methoxyethylribose
  modified_base 2: mod_base = OTHER; note = sugar modification: 2'-O-methoxyethylribose; note = backbone modification: 5'-phosphorothioate
  modified_base 3: mod_base = OTHER; note = sugar modification: 2'-O-methoxyethylribose; note = backbone modification: 5'-phosphorothioate; note = thymine
  modified_base 4: mod_base = OTHER; note = sugar modification: 2-fluororibose; note = backbone modification: 5'-phosphorothioate; note = thymine
  modified_base 5: mod_base = OTHER; mod_base = m5c; note = sugar modification: 2-fluororibose; note = backbone modification: 5'-phosphorothioate
  modified_base 6: mod_base = OTHER; note = thymine; note = backbone modification: 5'-phosphorothioate; note = sugar modification: 2-fluororibose
  modified_base 7: mod_base = OTHER; note = sugar modification: 2-fluororibose; note = backbone modification: 5'-phosphorothioate; note = thymine
  modified_base 8: mod_base = OTHER; note = backbone modification: 5'-phosphorothioate; note = sugar modification: 2'-O-methoxyethylribose
  modified_base 9: mod_base = OTHER; note = thymine; note = sugar modification: 2'-O-methoxyethylribose; note = backbone modification: 5'-phosphorothioate
  modified_base 10: mod_base = OTHER; note = backbone modification: 5'-phosphorothioate; note = sugar modification: 2'-O-methoxyethylribose
  modified_base 11: mod_base = m5c; mod_base = OTHER; note = sugar modification: 2'-O-methoxyethylribose; note = backbone modification: 5'-phosphorothioate
  modified_base 12: mod_base = OTHER; note = sugar modification: 2-fluororibose; note = backbone modification: 5'-phosphorothioate; note = thymine
  modified_base 13: mod_base = OTHER; note = backbone modification: 5'-phosphorothioate; note = sugar modification: 2-fluororibose; note = thymine
  modified_base 14: mod_base = OTHER; mod_base = m5c; note = sugar modification: 2-fluororibose; note = backbone modification: 5'-phosphorothioate
  modified_base 15: mod_base = OTHER; note = backbone modification: 5'-phosphorothioate; note = sugar modification: 2-fluororibose
  modified_base 16: mod_base = OTHER; note = sugar modification: 2'-O-methoxyethylribose; note = thymine; note = backbone modification: 5'-phosphorothioate
  modified_base 17: mod_base = m5c; mod_base = OTHER; note = backbone modification: 5'-phosphorothioate; note = sugar modification: 2'-O-methoxyethylribose
  modified_base 18: mod_base = OTHER; mod_base = m5c; note = sugar modification: 2'-O-methoxyethylribose
tgttcttgtacttcatcc

SEQ ID NO: 1174 - RNA, 18 nt, synthetic construct
  source 1..18: mol_type = other RNA; note = Antisense oligonucleotide
  modified_base 1: mod_base = OTHER; note = backbone modification: 5'-phosphorothioate; note = thymine; note = sugar modification: 2'-O-methoxyethylribose
  modified_base 2: mod_base = OTHER; note = sugar modification: 2'-O-methoxyethylribose; note = backbone modification: 5'-phosphorothioate
  modified_base 3: mod_base = OTHER; note = thymine; note = backbone modification: 5'-phosphorothioate; note = sugar modification: 2'-O-methoxyethylribose
  modified_base 4: mod_base = OTHER; note = thymine; note = backbone modification: 5'-phosphorothioate; note = sugar modification: 2-fluororibose
  modified_base 5: mod_base = m5c; mod_base = OTHER; note = backbone modification: 5'-phosphorothioate; note = sugar modification: 2-fluororibose
  modified_base 6: mod_base = OTHER; note = thymine; note = sugar modification: 2'-O-methoxyethylribose; note = backbone modification: 5'-phosphorothioate
  modified_base 7: mod_base = OTHER; note = sugar modification: 2'-O-methoxyethylribose; note = backbone modification: 5'-phosphorothioate; note = thymine
  modified_base 8: mod_base = OTHER; note = sugar modification: 2'-O-methoxyethylribose; note = backbone modification: 5'-phosphorothioate
  modified_base 9: mod_base = OTHER; note = thymine; note = sugar modification: 2-fluororibose; note = backbone modification: 5'-phosphorothioate
  modified_base 10: mod_base = OTHER; note = sugar modification: 2-fluororibose; note = backbone modification: 5'-phosphorothioate
  modified_base 11: mod_base = m5c; mod_base = OTHER; note = sugar modification: 2'-O-methoxyethylribose; note = backbone modification: 5'-phosphorothioate
  modified_base 12: mod_base = OTHER; note = thymine; note = backbone modification: 5'-phosphorothioate; note = sugar modification: 2'-O-methoxyethylribose
  modified_base 13: mod_base = OTHER; note = thymine; note = backbone modification: 5'-phosphorothioate; note = sugar modification: 2'-O-methoxyethylribose
  modified_base 14: mod_base = OTHER; mod_base = m5c; note = sugar modification: 2'-O-methoxyethylribose; note = backbone modification: 5'-phosphorothioate
  modified_base 15: mod_base = OTHER; note = backbone modification: 5'-phosphorothioate; note = sugar modification: 2'-O-methoxyethylribose
  modified_base 16: mod_base = OTHER; note = thymine; note = backbone modification: 5'-phosphorothioate; note = sugar modification: 2'-O-methoxyethylribose
  modified_base 17: mod_base = OTHER; mod_base = m5c; note = backbone modification: 5'-phosphorothioate; note = sugar modification: 2'-O-methoxyethylribose
  modified_base 18: mod_base = OTHER; mod_base = m5c; note = sugar modification: 2'-O-methoxyethylribose
tgttcttgtacttcatcc

SEQ ID NO: 1175 - RNA, 18 nt, synthetic construct
  source 1..18: mol_type = other RNA; note = Antisense oligonucleotide
  modified_base 1: mod_base = OTHER; note = sugar modification: 2'-O-methoxyethylribose; note = thymine; note = backbone modification: 5'-phosphorothioate
  modified_base 2: mod_base = OTHER; note = sugar modification: 2'-O-methoxyethylribose; note = backbone modification: 5'-phosphorothioate
  modified_base 3: mod_base = OTHER; note = backbone modification: 5'-phosphorothioate; note = sugar modification: 2'-O-methoxyethylribose; note = thymine
  modified_base 4: mod_base = OTHER; note = thymine; note = sugar modification: 2-fluororibose; note = backbone modification: 5'-phosphorothioate
  modified_base 5: mod_base = OTHER; mod_base = m5c; note = backbone modification: 5'-phosphorothioate; note = sugar modification: 2-fluororibose
  modified_base 6: mod_base = OTHER; note = sugar modification: 2-fluororibose; note = thymine; note = backbone modification: 5'-phosphorothioate
  modified_base 7: mod_base = OTHER; note = backbone modification: 5'-phosphorothioate; note = thymine; note = sugar modification: 2-fluororibose
  modified_base 8: mod_base = OTHER; note = backbone modification: 5'-phosphorothioate; note = sugar modification: 2'-O-methoxyethylribose
  modified_base 9: mod_base = OTHER; note = thymine; note = sugar modification: 2-fluororibose; note = backbone modification: 5'-phosphorothioate
  modified_base 10: mod_base = OTHER; note = backbone modification: 5'-phosphorothioate; note = sugar modification: 2-fluororibose
  modified_base 11: mod_base = OTHER; mod_base = m5c; note = backbone modification: 5'-phosphorothioate; note = sugar modification: 2'-O-methoxyethylribose
  modified_base 12: mod_base = OTHER; note = thymine; note = backbone modification: 5'-phosphorothioate; note = sugar modification: 2'-O-methoxyethylribose
  modified_base 13: mod_base = OTHER; note = sugar modification: 2'-O-methoxyethylribose; note = backbone modification: 5'-phosphorothioate; note = thymine
  modified_base 14: mod_base = OTHER; mod_base = m5c; note = backbone modification: 5'-phosphorothioate; note = sugar modification: 2'-O-methoxyethylribose
  modified_base 15: mod_base = OTHER; note = sugar modification: 2'-O-methoxyethylribose; note = backbone modification: 5'-phosphorothioate
  modified_base 16: mod_base = OTHER; note = sugar modification: 2'-O-methoxyethylribose; note = backbone modification: 5'-phosphorothioate; note = thymine
  modified_base 17: mod_base = m5c; mod_base = OTHER; note = sugar modification: 2'-O-methoxyethylribose; note = backbone modification: 5'-phosphorothioate
  modified_base 18: mod_base = OTHER; mod_base = m5c; note = sugar modification: 2'-O-methoxyethylribose
tgttcttgtacttcatcc

SEQ ID NO: 1176 - RNA, 18 nt, synthetic construct
  source 1..18: mol_type = other RNA; note = Antisense oligonucleotide
  modified_base 1: mod_base = OTHER; note = backbone modification: 5'-phosphorothioate; note = thymine; note = sugar modification: 2'-O-methoxyethylribose
  modified_base 2: mod_base = OTHER; note = backbone modification: 5'-phosphorothioate; note = sugar modification: 2'-O-methoxyethylribose
  modified_base 3: mod_base = OTHER; note = thymine; note = sugar modification: 2'-O-methoxyethylribose; note = backbone modification: 5'-phosphorothioate
  modified_base 4: mod_base = OTHER; note = thymine; note = sugar modification: 2'-O-methoxyethylribose; note = backbone modification: 5'-phosphorothioate
  modified_base 5: mod_base = OTHER; mod_base = m5c; note = backbone modification: 5'-phosphorothioate; note = sugar modification: 2'-O-methoxyethylribose
  modified_base 6: mod_base = OTHER; note = backbone modification: 5'-phosphorothioate; note = thymine; note = sugar modification: 2'-O-methoxyethylribose
  modified_base 7: mod_base = OTHER; note = backbone modification: 5'-phosphorothioate; note = thymine; note = sugar modification: 2'-O-methoxyethylribose
  modified_base 8: mod_base = OTHER; note = sugar modification: 2'-O-methoxyethylribose; note = backbone modification: 5'-phosphorothioate
  modified_base 9: mod_base = OTHER; note = backbone modification: 5'-phosphorothioate; note = sugar modification: 2-fluororibose; note = thymine
  modified_base 10: mod_base = OTHER; note = backbone modification: 5'-phosphorothioate; note = sugar modification: 2-fluororibose
  modified_base 11: mod_base = OTHER; mod_base = m5c; note = backbone modification: 5'-phosphorothioate; note = sugar modification: 2'-O-methoxyethylribose
  modified_base 12: mod_base = OTHER; note = backbone modification: 5'-phosphorothioate; note = thymine; note = sugar modification: 2'-O-methoxyethylribose
  modified_base 13: mod_base = OTHER; note = sugar modification: 2'-O-methoxyethylribose; note = thymine; note = backbone modification: 5'-phosphorothioate
  modified_base 14: mod_base = m5c; mod_base = OTHER; note = backbone modification: 5'-phosphorothioate; note = sugar modification: 2-fluororibose
  modified_base 15: mod_base = OTHER; note = sugar modification: 2-fluororibose; note = backbone modification: 5'-phosphorothioate
  modified_base 16: mod_base = OTHER; note = sugar modification: 2'-O-methoxyethylribose; note = backbone modification: 5'-phosphorothioate; note = thymine
  modified_base 17: mod_base = m5c; mod_base = OTHER; note = sugar modification: 2'-O-methoxyethylribose; note = backbone modification: 5'-phosphorothioate
  modified_base 18: mod_base = m5c; mod_base = OTHER; note = sugar modification: 2'-O-methoxyethylribose
tgttcttgtacttcatcc

SEQ ID NO: 1177 - RNA, 18 nt, synthetic construct
  source 1..18: mol_type = other RNA; note = Antisense oligonucleotide
  modified_base 1: mod_base = OTHER; note = sugar modification: 2'-O-methoxyethylribose; note = backbone modification: 5'-phosphorothioate; note = thymine
  modified_base 2: mod_base = OTHER; note = sugar modification: 2'-O-methoxyethylribose; note = backbone modification: 5'-phosphorothioate
  modified_base 3: mod_base = OTHER; note = sugar modification: 2'-O-methoxyethylribose; note = backbone modification: 5'-phosphorothioate; note = thymine
  modified_base 4: mod_base = OTHER; note = thymine; note = backbone modification: 5'-phosphorothioate; note = sugar modification: 2'-O-methoxyethylribose
  modified_base 5: mod_base = OTHER; mod_base = m5c; note = sugar modification: 2'-O-methoxyethylribose; note = backbone modification: 5'-phosphorothioate
  modified_base 6: mod_base = OTHER; note = sugar modification: 2'-O-methoxyethylribose; note = backbone modification: 5'-phosphorothioate; note = thymine
  modified_base 7: mod_base = OTHER; note = sugar modification: 2'-O-methoxyethylribose; note = thymine; note = backbone modification: 5'-phosphorothioate
  modified_base 8: mod_base = OTHER; note = sugar modification: 2'-O-methoxyethylribose; note = backbone modification: 5'-phosphorothioate
  modified_base 9: mod_base = OTHER; note = sugar modification: 2-fluororibose; note = thymine; note = backbone modification: 5'-phosphorothioate
  modified_base 10: mod_base = OTHER; note = sugar modification: 2-fluororibose; note = backbone modification: 5'-phosphorothioate
  modified_base 11: mod_base = OTHER; mod_base = m5c; note = backbone modification: 5'-phosphorothioate; note = sugar modification: 2'-O-methoxyethylribose
  modified_base 12: mod_base = OTHER; note = backbone modification: 5'-phosphorothioate; note = thymine; note = sugar modification: 2-fluororibose
  modified_base 13: mod_base = OTHER; note = backbone modification: 5'-phosphorothioate; note = thymine; note = sugar modification: 2-fluororibose
  modified_base 14: mod_base = m5c; mod_base = OTHER; note = backbone modification: 5'-phosphorothioate; note = sugar modification: 2-fluororibose
  modified_base 15: mod_base = OTHER; note = sugar modification: 2-fluororibose; note = backbone modification: 5'-phosphorothioate
  modified_base 16: mod_base = OTHER; note = sugar modification: 2'-O-methoxyethylribose; note = thymine; note = backbone modification: 5'-phosphorothioate
  modified_base 17: mod_base = OTHER; mod_base = m5c; note = sugar modification: 2'-O-methoxyethylribose; note = backbone modification: 5'-phosphorothioate
  modified_base 18: mod_base = OTHER; mod_base = m5c; note = sugar modification: 2'-O-methoxyethylribose
tgttcttgtacttcatcc

SEQ ID NO: 1178 - RNA, 18 nt, synthetic construct
  source 1..18: mol_type = other RNA; note = Antisense oligonucleotide
  modified_base 1: mod_base = OTHER; note = sugar modification: 2'-O-methoxyethylribose; note = backbone modification: 5'-phosphorothioate; note = thymine
  modified_base 2: mod_base = OTHER; note = backbone modification: 5'-phosphorothioate; note = sugar modification: 2'-O-methoxyethylribose
  modified_base 3: mod_base = OTHER; note = thymine; note = backbone modification: 5'-phosphorothioate; note = sugar modification: 2'-O-methoxyethylribose
  modified_base 4: mod_base = OTHER; note = sugar modification: 2'-O-methoxyethylribose; note = thymine; note = backbone modification: 5'-phosphorothioate
  modified_base 5: mod_base = OTHER; mod_base = m5c; note = sugar modification: 2-fluororibose; note = backbone modification: 5'-phosphorothioate
  modified_base 6: mod_base = OTHER; note = sugar modification: 2-fluororibose; note = thymine; note = backbone modification: 5'-phosphorothioate
  modified_base 7: mod_base = OTHER; note = backbone modification: 5'-phosphorothioate; note = thymine; note = sugar modification: 2'-O-methoxyethylribose
  modified_base 8: mod_base = OTHER; note = backbone modification: 5'-phosphorothioate; note = sugar modification: 2'-O-methoxyethylribose
  modified_base 9: mod_base = OTHER; note = thymine; note = sugar modification: 2-fluororibose; note = backbone modification: 5'-phosphorothioate
  modified_base 10: mod_base = OTHER; note = sugar modification: 2-fluororibose; note = backbone modification: 5'-phosphorothioate
  modified_base 11: mod_base = m5c; mod_base = OTHER; note = backbone modification: 5'-phosphorothioate; note = sugar modification: 2'-O-methoxyethylribose
  modified_base 12: mod_base = OTHER; note = thymine; note = sugar modification: 2'-O-methoxyethylribose; note = backbone modification: 5'-phosphorothioate
  modified_base 13: mod_base = OTHER; note = backbone modification: 5'-phosphorothioate; note = thymine; note = sugar modification: 2-fluororibose
  modified_base 14: mod_base = m5c; mod_base = OTHER; note = sugar modification: 2-fluororibose; note = backbone modification: 5'-phosphorothioate
  modified_base 15: mod_base = OTHER; note = backbone modification: 5'-phosphorothioate; note = sugar modification: 2-fluororibose
  modified_base 16: mod_base = OTHER; note = thymine; note = sugar modification: 2'-O-methoxyethylribose; note = backbone modification: 5'-phosphorothioate
  modified_base 17: mod_base = OTHER; mod_base = m5c; note = sugar modification: 2'-O-methoxyethylribose; note = backbone modification: 5'-phosphorothioate
  modified_base 18: mod_base = OTHER; mod_base = m5c; note = sugar modification: 2'-O-methoxyethylribose
tgttcttgtacttcatcc

SEQ ID NO: 1179 - RNA, 18 nt, synthetic construct
  source 1..18: mol_type = other RNA; note = Antisense oligonucleotide
  modified_base 1: mod_base = OTHER; note = backbone modification: 5'-phosphorothioate; note = sugar modification: 2'-O-methoxyethylribose; note = thymine
  modified_base 2: mod_base = OTHER; note = backbone modification: 5'-phosphorothioate; note = sugar modification: 2'-O-methoxyethylribose
  modified_base 3: mod_base = OTHER; note = sugar modification: 2'-O-methoxyethylribose; note = backbone modification: 5'-phosphorothioate; note = thymine
  modified_base 4: mod_base = OTHER; note = backbone modification: 5'-phosphorothioate; note = thymine; note = sugar modification: 2'-O-methoxyethylribose
  modified_base 5: mod_base = m5c; mod_base = OTHER; note = backbone modification: 5'-phosphorothioate; note = sugar modification: 2-fluororibose
  modified_base 6: mod_base = OTHER; note = sugar modification: 2-fluororibose; note = thymine; note = backbone modification: 5'-phosphorothioate
  modified_base 7: mod_base = OTHER; note = backbone modification: 5'-phosphorothioate; note = thymine; note = sugar modification: 2-fluororibose
  modified_base 8: mod_base = OTHER; note = backbone modification: 5'-phosphorothioate; note = sugar modification: 2'-O-methoxyethylribose
  modified_base 9: mod_base = OTHER; note = sugar modification: 2-fluororibose; note = thymine; note = backbone modification: 5'-phosphorothioate
  modified_base 10: mod_base = OTHER; note = backbone modification: 5'-phosphorothioate; note = sugar modification: 2-fluororibose
  modified_base 11: mod_base = OTHER; mod_base = m5c; note = backbone modification: 5'-phosphorothioate; note = sugar modification: 2'-O-methoxyethylribose
  modified_base 12: mod_base = OTHER; note = sugar modification: 2'-O-methoxyethylribose; note = backbone modification: 5'-phosphorothioate; note = thymine
  modified_base 13: mod_base = OTHER; note = sugar modification: 2'-O-methoxyethylribose; note = backbone modification: 5'-phosphorothioate; note = thymine
  modified_base 14: mod_base = m5c; mod_base = OTHER; note = sugar modification: 2-fluororibose; note = backbone modification: 5'-phosphorothioate
  modified_base 15: mod_base = OTHER; note = backbone modification: 5'-phosphorothioate; note = sugar modification: 2-fluororibose
  modified_base 16: mod_base = OTHER; note = backbone modification: 5'-phosphorothioate; note = thymine; note = sugar modification: 2'-O-methoxyethylribose
  modified_base 17: mod_base = m5c; mod_base = OTHER; note = backbone modification: 5'-phosphorothioate; note = sugar modification: 2'-O-methoxyethylribose
  modified_base 18: mod_base = OTHER; mod_base = m5c; note = sugar modification: 2'-O-methoxyethylribose
tgttcttgtacttcatcc

SEQ ID NO: 1180 - RNA, 18 nt, synthetic construct
  source 1..18: mol_type = other RNA; note = Antisense oligonucleotide
  modified_base 1: mod_base = OTHER; note = backbone modification: 5'-phosphorothioate; note = thymine; note = sugar modification: 2'-O-methoxyethylribose
  modified_base 2: mod_base = OTHER; note = backbone modification: 5'-phosphorothioate; note = sugar modification: 2'-O-methoxyethylribose
  modified_base 3: mod_base = OTHER; note = thymine; note = backbone modification: 5'-phosphorothioate; note = sugar modification: 2'-O-methoxyethylribose
  modified_base 4: mod_base = OTHER; note = thymine; note = sugar modification: 2-fluororibose; note = backbone modification: 5'-phosphorothioate
  modified_base 5: mod_base = m5c; mod_base = OTHER; note = sugar modification: 2-fluororibose; note = backbone modification: 5'-phosphorothioate
  modified_base 6: mod_base = OTHER; note = backbone modification: 5'-phosphorothioate; note = thymine; note = sugar modification: 2'-O-methoxyethylribose
  modified_base 7: mod_base = OTHER; note = sugar modification: 2'-O-methoxyethylribose; note = thymine; note = backbone modification: 5'-phosphorothioate
  modified_base 8: mod_base = OTHER; note = sugar modification: 2'-O-methoxyethylribose; note = backbone modification: 5'-phosphorothioate
  modified_base 9: mod_base = OTHER; note = backbone modification: 5'-phosphorothioate; note = thymine; note = sugar modification: 2'-O-methoxyethylribose
  modified_base 10: mod_base = OTHER; note = backbone modification: 5'-phosphorothioate; note = sugar modification: 2'-O-methoxyethylribose
  modified_base 11: mod_base = m5c; mod_base = OTHER; note = sugar modification: 2'-O-methoxyethylribose; note = backbone modification: 5'-phosphorothioate
  modified_base 12: mod_base = OTHER; note = thymine; note = backbone modification: 5'-phosphorothioate; note = sugar modification: 2'-O-methoxyethylribose
  modified_base 13: mod_base = OTHER; note = thymine; note = backbone modification: 5'-phosphorothioate; note = sugar modification: 2'-O-methoxyethylribose
  modified_base 14: mod_base = OTHER; mod_base = m5c; note = backbone modification: 5'-phosphorothioate; note = sugar modification: 2'-O-methoxyethylribose
  modified_base 15: mod_base = OTHER; note = sugar modification: 2'-O-methoxyethylribose; note = backbone modification: 5'-phosphorothioate
  modified_base 16: mod_base = OTHER; note = backbone modification: 5'-phosphorothioate; note = sugar modification: 2'-O-methoxyethylribose; note = thymine
  modified_base 17: mod_base = m5c; mod_base = OTHER; note = sugar modification: 2'-O-methoxyethylribose; note = backbone modification: 5'-phosphorothioate
  modified_base 18: mod_base = m5c; mod_base = OTHER; note = sugar modification: 2'-O-methoxyethylribose
tgttcttgtacttcatcc

SEQ ID NO: 1181 - RNA, 18 nt, synthetic construct
  source 1..18: mol_type = other RNA; note = Antisense oligonucleotide
  modified_base 1: mod_base = OTHER; note = sugar modification: 2'-O-methoxyethylribose; note = backbone modification: 5'-phosphorothioate; note = thymine
  modified_base 2: mod_base = OTHER; note = sugar modification: 2'-O-methoxyethylribose; note = backbone modification: 5'-phosphorothioate
  modified_base 3: mod_base = OTHER; note = thymine; note = backbone modification: 5'-phosphorothioate; note = sugar modification: 2'-O-methoxyethylribose
  modified_base 4: mod_base = OTHER; note = backbone modification: 5'-phosphorothioate; note = sugar modification: 2-fluororibose; note = thymine
  modified_base 5: mod_base = OTHER; mod_base = m5c; note = backbone modification: 5'-phosphorothioate; note = sugar modification: 2-fluororibose
  modified_base 6: mod_base = OTHER; note = backbone modification: 5'-phosphorothioate; note = thymine; note = sugar modification: 2-fluororibose
  modified_base 7: mod_base = OTHER; note = thymine; note = backbone modification: 5'-phosphorothioate; note = sugar modification: 2-fluororibose
  modified_base 8: mod_base = OTHER; note = backbone modification: 5'-phosphorothioate; note = sugar modification: 2'-O-methoxyethylribose
  modified_base 9: mod_base = OTHER; note = backbone modification: 5'-phosphorothioate; note = thymine; note = sugar modification: 2'-O-methoxyethylribose
  modified_base 10: mod_base = OTHER; note = sugar modification: 2'-O-methoxyethylribose; note = backbone modification: 5'-phosphorothioate
  modified_base 11: mod_base = OTHER; mod_base = m5c; note = backbone modification: 5'-phosphorothioate; note = sugar modification: 2'-O-methoxyethylribose
  modified_base 12: mod_base = OTHER; note = sugar modification: 2'-O-methoxyethylribose; note = thymine; note = backbone modification: 5'-phosphorothioate
  modified_base 13: mod_base = OTHER; note = backbone modification: 5'-phosphorothioate; note = sugar modification: 2'-O-methoxyethylribose; note = thymine
  modified_base 14: mod_base = m5c; mod_base = OTHER; note = backbone modification: 5'-phosphorothioate; note = sugar modification: 2'-O-methoxyethylribose
  modified_base 15: mod_base = OTHER; note = backbone modification: 5'-phosphorothioate; note = sugar modification: 2'-O-methoxyethylribose
  modified_base 16: mod_base = OTHER; note = sugar modification: 2'-O-methoxyethylribose; note = thymine; note = backbone modification: 5'-phosphorothioate
  modified_base 17: mod_base = m5c; mod_base = OTHER; note = backbone modification: 5'-phosphorothioate; note = sugar modification: 2'-O-methoxyethylribose
  modified_base 18: mod_base = OTHER; mod_base = m5c; note = sugar modification: 2'-O-methoxyethylribose
tgttcttgtacttcatcc

SEQ ID NO: 1182 - RNA, 18 nt, synthetic construct
  source 1..18: mol_type = other RNA; note = Antisense oligonucleotide
  modified_base 1: mod_base = OTHER; note = sugar modification: 2'-O-methoxyethylribose; note = thymine; note = backbone modification: 5'-phosphorothioate
  modified_base 2: mod_base = OTHER; note = backbone modification: 5'-phosphorothioate; note = sugar modification: 2'-O-methoxyethylribose
  modified_base 3: mod_base = OTHER; note = sugar modification: 2'-O-methoxyethylribose; note = thymine; note = backbone modification: 5'-phosphorothioate
  modified_base 4: mod_base = OTHER; note = thymine; note = sugar modification: 2'-O-methoxyethylribose; note = backbone modification: 5'-phosphorothioate
  modified_base 5: mod_base = OTHER; mod_base = m5c; note = sugar modification: 2'-O-methoxyethylribose; note = backbone modification: 5'-phosphorothioate
  modified_base 6: mod_base = OTHER; note = sugar modification: 2'-O-methoxyethylribose; note = thymine; note = backbone modification: 5'-phosphorothioate
  modified_base 7: mod_base = OTHER; note = thymine; note = backbone modification: 5'-phosphorothioate; note = sugar modification: 2'-O-methoxyethylribose
  modified_base 8: mod_base = OTHER; note = backbone modification: 5'-phosphorothioate; note = sugar modification: 2'-O-methoxyethylribose
  modified_base 9: mod_base = OTHER; note = sugar modification: 2'-O-methoxyethylribose; note = thymine; note = backbone modification: 5'-phosphorothioate
  modified_base 10: mod_base = OTHER; note = backbone modification: 5'-phosphorothioate; note = sugar modification: 2'-O-methoxyethylribose
  modified_base 11: mod_base = OTHER; mod_base = m5c; note = backbone modification: 5'-phosphorothioate; note = sugar modification: 2'-O-methoxyethylribose
  modified_base 12: mod_base = OTHER; note = thymine; note = sugar modification: 2'-O-methoxyethylribose; note = backbone modification: 5'-phosphorothioate
  modified_base 13: mod_base = OTHER; note = thymine; note = sugar modification: 2'-O-methoxyethylribose; note = backbone modification: 5'-phosphorothioate
  modified_base 14: mod_base = OTHER; mod_base = m5c; note = sugar modification: 2-fluororibose; note = backbone modification: 5'-phosphorothioate
  modified_base 15: mod_base = OTHER; note = backbone modification: 5'-phosphorothioate; note = sugar modification: 2-fluororibose
  modified_base 16: mod_base = OTHER; note = thymine; note = backbone modification: 5'-phosphorothioate; note = sugar modification: 2'-O-methoxyethylribose
  modified_base 17: mod_base = OTHER; mod_base = m5c; note = sugar modification: 2'-O-methoxyethylribose; note = backbone modification: 5'-phosphorothioate
  modified_base 18: mod_base = m5c; mod_base = OTHER; note = sugar modification: 2'-O-methoxyethylribose
tgttcttgtacttcatcc

SEQ ID NO: 1183 - RNA, 18 nt, synthetic construct
  source 1..18: mol_type = other RNA; note = Antisense oligonucleotide
  modified_base 1: mod_base = OTHER; note = backbone modification: 5'-phosphorothioate; note = sugar modification: 2'-O-methoxyethylribose; note = thymine
  modified_base 2: mod_base = OTHER; note = backbone modification: 5'-phosphorothioate; note = sugar modification: 2'-O-methoxyethylribose
  modified_base 3: mod_base = OTHER; note = thymine; note = sugar modification: 2'-O-methoxyethylribose; note = backbone modification: 5'-phosphorothioate
  modified_base 4: mod_base = OTHER; note = sugar modification: 2'-O-methoxyethylribose; note = backbone modification: 5'-phosphorothioate; note = thymine
  modified_base 5: mod_base = m5c; mod_base = OTHER; note = sugar modification: 2'-O-methoxyethylribose; note = backbone modification: 5'-phosphorothioate
  modified_base 6: mod_base = OTHER; note = sugar modification: 2'-O-methoxyethylribose; note = thymine; note = backbone modification: 5'-phosphorothioate
  modified_base 7: mod_base = OTHER; note = thymine; note = backbone modification: 5'-phosphorothioate; note = sugar modification: 2'-O-methoxyethylribose
  modified_base 8: mod_base = OTHER; note = sugar modification: 2'-O-methoxyethylribose; note = backbone modification: 5'-phosphorothioate
  modified_base 9: mod_base = OTHER; note = backbone modification: 5'-phosphorothioate; note = thymine; note = sugar modification: 2'-O-methoxyethylribose
  modified_base 10: mod_base = OTHER; note = sugar modification: 2'-O-methoxyethylribose; note = backbone modification: 5'-phosphorothioate
  modified_base 11: mod_base = OTHER; mod_base = m5c; note = backbone modification: 5'-phosphorothioate; note = sugar modification: 2'-O-methoxyethylribose
  modified_base 12: mod_base = OTHER; note = sugar modification: 2-fluororibose; note = backbone modification: 5'-phosphorothioate; note = thymine
  modified_base 13: mod_base = OTHER; note = thymine; note = sugar modification: 2-fluororibose; note = backbone modification: 5'-phosphorothioate
  modified_base 14: mod_base = OTHER; mod_base = m5c; note = sugar modification: 2-fluororibose; note = backbone modification: 5'-phosphorothioate
  modified_base 15: mod_base = OTHER; note = sugar modification: 2-fluororibose; note = backbone modification: 5'-phosphorothioate
  modified_base 16: mod_base = OTHER; note = backbone modification: 5'-phosphorothioate; note = thymine; note = sugar modification: 2'-O-methoxyethylribose
  modified_base 17: mod_base = OTHER; mod_base = m5c; note = sugar modification: 2'-O-methoxyethylribose; note = backbone modification: 5'-phosphorothioate
  modified_base 18: mod_base = m5c; mod_base = OTHER; note = sugar modification: 2'-O-methoxyethylribose
tgttcttgtacttcatcc

SEQ ID NO: 1184 - RNA, 18 nt, synthetic construct
  source 1..18: mol_type = other RNA; note = Antisense oligonucleotide
  modified_base 1: mod_base = OTHER; note = backbone modification: 5'-phosphorothioate; note = sugar modification: 2'-O-methoxyethylribose; note = thymine
  modified_base 2: mod_base = OTHER; note = sugar modification: 2'-O-methoxyethylribose; note = backbone modification: 5'-phosphorothioate
  modified_base 3: mod_base = OTHER; note = backbone modification: 5'-phosphorothioate; note = sugar modification: 2'-O-methoxyethylribose; note = thymine
  modified_base 4: mod_base = OTHER; note = thymine; note = sugar modification: 2'-O-methoxyethylribose; note = backbone modification: 5'-phosphorothioate
  modified_base 5: mod_base = OTHER; mod_base = m5c; note = backbone modification: 5'-phosphorothioate; note = sugar modification: 2-fluororibose
  modified_base 6: mod_base = OTHER; note = sugar modification: 2-fluororibose; note = backbone modification: 5'-phosphorothioate; note = thymine
  modified_base 7: mod_base = OTHER; note = thymine; note = sugar modification: 2'-O-methoxyethylribose; note = backbone modification: 5'-phosphorothioate
  modified_base 8: mod_base = OTHER; note = backbone modification: 5'-phosphorothioate; note = sugar modification: 2'-O-methoxyethylribose
  modified_base 9: mod_base = OTHER; note = thymine; note = backbone modification: 5'-phosphorothioate; note = sugar modification: 2'-O-methoxyethylribose
  modified_base 10: mod_base = OTHER; note = sugar modification: 2'-O-methoxyethylribose; note = backbone modification: 5'-phosphorothioate
  modified_base 11: mod_base = OTHER; mod_base = m5c; note = sugar modification: 2'-O-methoxyethylribose; note = backbone modification: 5'-phosphorothioate
  modified_base 12: mod_base = OTHER; note = thymine; note = sugar modification: 2'-O-methoxyethylribose; note = backbone modification: 5'-phosphorothioate
  modified_base 13: mod_base = OTHER; note = sugar modification: 2-fluororibose; note = backbone modification: 5'-phosphorothioate; note = thymine
  modified_base 14: mod_base = m5c; mod_base = OTHER; note = sugar modification: 2-fluororibose; note = backbone modification: 5'-phosphorothioate
  modified_base 15: mod_base = OTHER; note = sugar modification: 2-fluororibose; note = backbone modification: 5'-phosphorothioate
  modified_base 16: mod_base = OTHER; note = thymine; note = sugar modification: 2'-O-methoxyethylribose; note = backbone modification: 5'-phosphorothioate
  modified_base 17: mod_base = OTHER; mod_base = m5c; note = backbone modification: 5'-phosphorothioate; note = sugar modification: 2'-O-methoxyethylribose
  modified_base 18: mod_base = OTHER; mod_base = m5c; note = sugar modification: 2'-O-methoxyethylribose
tgttcttgtacttcatcc

SEQ ID NO: 1185 - RNA, 18 nt, synthetic construct
  source 1..18: mol_type = other RNA; note = Antisense oligonucleotide
  modified_base 1: mod_base = OTHER; note = thymine; note = backbone modification: 5'-phosphorothioate; note = sugar modification: 2'-O-methoxyethylribose
  modified_base 2: mod_base = OTHER; note = sugar modification: 2'-O-methoxyethylribose; note = backbone modification: 5'-phosphorothioate
  modified_base 3: mod_base = OTHER; note = thymine; note = backbone modification: 5'-phosphorothioate; note = sugar modification: 2'-O-methoxyethylribose
  modified_base 4: mod_base = OTHER; note = sugar modification: 2'-O-methoxyethylribose; note = thymine; note = backbone modification: 5'-phosphorothioate
  modified_base 5: mod_base = OTHER; mod_base = m5c; note = backbone modification: 5'-phosphorothioate; note = sugar modification: 2-fluororibose
  modified_base 6: mod_base = OTHER; note = sugar modification: 2-fluororibose; note = backbone modification: 5'-phosphorothioate; note = thymine
  modified_base 7: mod_base = OTHER; note = backbone modification: 5'-phosphorothioate; note = sugar modification: 2-fluororibose; note = thymine
  modified_base 8: mod_base = OTHER; note = backbone modification: 5'-phosphorothioate; note = sugar modification: 2'-O-methoxyethylribose
  modified_base 9: mod_base = OTHER; note = backbone modification: 5'-phosphorothioate; note = thymine; note = sugar modification: 2'-O-methoxyethylribose
  modified_base 10: mod_base = OTHER; note = backbone modification: 5'-phosphorothioate; note = sugar modification: 2'-O-methoxyethylribose
  modified_base 11: mod_base = OTHER; mod_base = m5c; note = backbone modification: 5'-phosphorothioate; note = sugar modification: 2'-O-methoxyethylribose
  modified_base 12: mod_base = OTHER; note = backbone modification: 5'-phosphorothioate; note = thymine; note = sugar modification: 2'-O-methoxyethylribose
  modified_base 13: mod_base = OTHER; note = sugar modification: 2'-O-methoxyethylribose; note = backbone modification: 5'-phosphorothioate; note = thymine
  modified_base 14: mod_base = m5c; mod_base = OTHER; note = backbone modification: 5'-phosphorothioate; note = sugar modification: 2-fluororibose
  modified_base 15: mod_base = OTHER; note = backbone modification: 5'-phosphorothioate; note = sugar modification: 2-fluororibose
  modified_base 16: mod_base = OTHER; note = thymine; note = sugar modification: 2'-O-methoxyethylribose; note = backbone modification: 5'-phosphorothioate
  modified_base 17: mod_base = OTHER; mod_base = m5c; note = sugar modification: 2'-O-methoxyethylribose; note = backbone modification: 5'-phosphorothioate
  modified_base 18: mod_base = OTHER; mod_base = m5c; note = sugar modification: 2'-O-methoxyethylribose
tgttcttgtacttcatcc

SEQ ID NO: 1186 - RNA, 18 nt, synthetic construct
  source 1..18: mol_type = other RNA; note = Antisense oligonucleotide
  modified_base 1: mod_base = OTHER; note = sugar modification: 2'-O-methoxyethylribose; note = backbone modification: 5'-phosphorothioate; note = thymine
  modified_base 2: mod_base = OTHER; note = backbone modification: 5'-phosphorothioate; note = sugar modification: 2'-O-methoxyethylribose
  modified_base 3: mod_base = OTHER; note = backbone modification: 5'-phosphorothioate; note = thymine; note = sugar modification: 2'-O-methoxyethylribose
  modified_base 4: mod_base = OTHER; note = sugar modification: 2'-O-methoxyethylribose; note = thymine; note = backbone modification: 5'-phosphorothioate
  modified_base 5: mod_base = m5c; mod_base = OTHER; note = backbone modification: 5'-phosphorothioate; note = sugar modification: 2-fluororibose
  modified_base 6: mod_base = OTHER; note = sugar modification: 2'-O-methoxyethylribose; note = backbone modification: 5'-phosphorothioate; note = thymine
  modified_base 7: mod_base = OTHER; note = sugar modification: 2'-O-methoxyethylribose; note = backbone modification: 5'-phosphorothioate; note = thymine
  modified_base 8: mod_base = OTHER; note = backbone modification: 5'-phosphorothioate; note = sugar modification: 2'-O-methoxyethylribose
  modified_base 9: mod_base = OTHER; note = backbone modification: 5'-phosphorothioate; note = sugar modification: 2-fluororibose; note = thymine
  modified_base 10: mod_base = OTHER; note = backbone modification: 5'-phosphorothioate; note = sugar modification: 2-fluororibose
  modified_base 11: mod_base = OTHER; mod_base = m5c; note = backbone modification: 5'-phosphorothioate; note = sugar modification: 2'-O-methoxyethylribose
  modified_base 12: mod_base = OTHER; note = sugar modification: 2'-O-methoxyethylribose; note = thymine; note = backbone modification: 5'-phosphorothioate
  modified_base 13: mod_base = OTHER; note = sugar modification: 2-fluororibose; note = backbone modification: 5'-phosphorothioate; note = thymine
  modified_base 14: mod_base = OTHER; mod_base = m5c; note = backbone modification: 5'-phosphorothioate; note = sugar modification: 2-fluororibose
  modified_base 15: mod_base = OTHER; note = backbone modification: 5'-phosphorothioate; note = sugar modification: 2-fluororibose
  modified_base 16: mod_base = OTHER; note = backbone modification: 5'-phosphorothioate; note = sugar modification: 2'-O-methoxyethylribose; note = thymine
  modified_base 17: mod_base = OTHER; mod_base = m5c; note = backbone modification: 5'-phosphorothioate; note = sugar modification: 2'-O-methoxyethylribose
  modified_base 18: mod_base = OTHER; mod_base = m5c; note = sugar modification: 2'-O-methoxyethylribose
tgttcttgtacttcatcc

SEQ ID NO: 1187 - RNA, 18 nt, synthetic construct
  source 1..18: mol_type = other RNA; note = Antisense oligonucleotide
  modified_base 1: mod_base = OTHER; note = sugar modification: 2'-O-methoxyethylribose; note = backbone modification: 5'-phosphorothioate; note = thymine
  modified_base 2: mod_base = OTHER; note = sugar modification: 2'-O-methoxyethylribose; note = backbone modification: 5'-phosphorothioate
  modified_base 3: mod_base = OTHER; note = thymine; note = sugar modification: 2'-O-methoxyethylribose; note = backbone modification: 5'-phosphorothioate
  modified_base 4: mod_base = OTHER; note = backbone modification: 5'-phosphorothioate; note = thymine; note = sugar modification: 2-fluororibose
  modified_base 5: mod_base = OTHER; mod_base = m5c; note = sugar modification: 2-fluororibose; note = backbone modification: 5'-phosphorothioate
  modified_base 6: mod_base = OTHER; note = thymine; note = sugar modification: 2'-O-methoxyethylribose; note = backbone modification: 5'-phosphorothioate
  modified_base 7: mod_base = OTHER; note = thymine; note = backbone modification: 5'-phosphorothioate; note = sugar modification: 2'-O-methoxyethylribose
  modified_base 8: mod_base = OTHER; note = backbone modification: 5'-phosphorothioate; note = sugar modification: 2'-O-methoxyethylribose
  modified_base 9: mod_base = OTHER; note = sugar modification: 2-fluororibose; note = backbone modification: 5'-phosphorothioate; note = thymine
  modified_base 10: mod_base = OTHER; note = backbone modification: 5'-phosphorothioate; note = sugar modification: 2-fluororibose
  modified_base 11: mod_base = OTHER; mod_base = m5c; note = sugar modification: 2'-O-methoxyethylribose; note = backbone modification: 5'-phosphorothioate
  modified_base 12: mod_base = OTHER; note = sugar modification: 2'-O-methoxyethylribose; note = backbone modification: 5'-phosphorothioate; note = thymine
  modified_base 13: mod_base = OTHER; note = sugar modification: 2-fluororibose; note = backbone modification: 5'-phosphorothioate; note = thymine
  modified_base 14: mod_base = OTHER; mod_base = m5c; note = sugar modification: 2-fluororibose; note = backbone modification: 5'-phosphorothioate
  modified_base 15: mod_base = OTHER; note = sugar modification: 2-fluororibose; note = backbone modification: 5'-phosphorothioate
  modified_base 16: mod_base = OTHER; note = backbone modification: 5'-phosphorothioate; note = thymine; note = sugar modification: 2'-O-methoxyethylribose
  modified_base 17: mod_base = m5c; mod_base = OTHER; note = backbone modification: 5'-phosphorothioate; note = sugar modification: 2'-O-methoxyethylribose
  modified_base 18: mod_base = m5c; mod_base = OTHER; note = sugar modification: 2'-O-methoxyethylribose
tgttcttgtacttcatcc

SEQ ID NO: 1188 - RNA, 18 nt, synthetic construct
  source 1..18: mol_type = other RNA; note = Antisense oligonucleotide
  modified_base 1: mod_base = OTHER; note = sugar modification: 2'-O-methoxyethylribose; note = backbone modification: 5'-phosphorothioate; note = thymine
  modified_base 2: mod_base = OTHER; note = backbone modification: 5'-phosphorothioate; note = sugar modification: 2'-O-methoxyethylribose
  modified_base 3: mod_base = OTHER; note = thymine; note = sugar modification: 2'-O-methoxyethylribose; note = backbone modification: 5'-phosphorothioate
  modified_base 4: mod_base = OTHER; note = backbone modification: 5'-phosphorothioate; note = sugar modification: 2-fluororibose; note = thymine
  modified_base 5: mod_base = m5c; mod_base = OTHER; note = backbone modification: 5'-phosphorothioate; note = sugar modification: 2-fluororibose
  modified_base 6: mod_base = OTHER; note = thymine; note = sugar modification: 2-fluororibose; note = backbone modification: 5'-phosphorothioate
  modified_base 7: mod_base = OTHER; note = thymine; note = sugar modification: 2'-O-methoxyethylribose; note = backbone modification: 5'-phosphorothioate
  modified_base 8: mod_base = OTHER; note = backbone modification: 5'-phosphorothioate; note = sugar modification: 2'-O-methoxyethylribose
  modified_base 9: mod_base = OTHER; note = backbone modification: 5'-phosphorothioate; note = sugar modification: 2-fluororibose; note = thymine
  modified_base 10: mod_base = OTHER; note = sugar modification: 2-fluororibose; note = backbone modification: 5'-phosphorothioate
  modified_base 11: mod_base = OTHER; mod_base = m5c; note = backbone modification: 5'-phosphorothioate; note = sugar modification: 2'-O-methoxyethylribose
  modified_base 12: mod_base = OTHER; note = backbone modification: 5'-phosphorothioate; note = sugar modification: 2'-O-methoxyethylribose; note = thymine
  modified_base 13: mod_base = OTHER; note = backbone modification: 5'-phosphorothioate; note = thymine; note = sugar modification: 2'-O-methoxyethylribose
  modified_base 14: mod_base = m5c; mod_base = OTHER; note = backbone modification: 5'-phosphorothioate; note = sugar modification: 2-fluororibose
  modified_base 15: mod_base = OTHER; note = sugar modification: 2'-O-methoxyethylribose; note = backbone modification: 5'-phosphorothioate
  modified_base 16: mod_base = OTHER; note = backbone modification: 5'-phosphorothioate; note = thymine; note = sugar modification: 2'-O-methoxyethylribose
  modified_base 17: mod_base = OTHER; mod_base = m5c; note = sugar modification: 2'-O-methoxyethylribose; note = backbone modification: 5'-phosphorothioate
  modified_base 18: mod_base = m5c; mod_base = OTHER; note = sugar modification: 2'-O-methoxyethylribose
tgttcttgtacttcatcc

SEQ ID NO: 1189 - RNA, 18 nt, synthetic construct
  source 1..18: mol_type = other RNA; note = Antisense oligonucleotide
  modified_base 1: mod_base = OTHER; note = thymine; note = sugar modification: 2'-O-methoxyethylribose; note = backbone modification: 5'-phosphorothioate
  modified_base 2: mod_base = OTHER; note = sugar modification: 2'-O-methoxyethylribose; note = backbone modification: 5'-phosphorothioate
  modified_base 3: mod_base = OTHER; note = backbone modification: 5'-phosphorothioate; note = sugar modification: 2'-O-methoxyethylribose; note = thymine
  modified_base 4: mod_base = OTHER; note = backbone modification: 5'-phosphorothioate; note = sugar modification: 2-fluororibose; note = thymine
  modified_base 5: mod_base = OTHER; mod_base = m5c; note = backbone modification: 5'-phosphorothioate; note = sugar modification: 2-fluororibose
  modified_base 6: mod_base = OTHER; note = backbone modification: 5'-phosphorothioate; note = thymine; note = sugar modification: 2-fluororibose
  modified_base 7: mod_base = OTHER; note = sugar modification: 2'-O-methoxyethylribose; note = backbone modification: 5'-phosphorothioate; note = thymine
  modified_base 8: mod_base = OTHER; note = sugar modification: 2'-O-methoxyethylribose; note = backbone modification: 5'-phosphorothioate
  modified_base 9: mod_base = OTHER; note = sugar modification: 2-fluororibose; note = backbone modification: 5'-phosphorothioate; note = thymine
  modified_base 10: mod_base = OTHER; note = sugar modification: 2-fluororibose; note = backbone modification: 5'-phosphorothioate
  modified_base 11: mod_base = m5c; mod_base = OTHER; note = sugar modification: 2'-O-methoxyethylribose; note = backbone modification: 5'-phosphorothioate
  modified_base 12: mod_base = OTHER; note = sugar modification: 2'-O-methoxyethylribose; note = thymine; note = backbone modification: 5'-phosphorothioate
  modified_base 13: mod_base = OTHER; note = backbone modification: 5'-phosphorothioate; note = sugar modification: 2'-O-methoxyethylribose; note = thymine
  modified_base 14: mod_base = OTHER; mod_base = m5c; note = sugar modification: 2-fluororibose; note = backbone modification: 5'-phosphorothioate
  modified_base 15: mod_base = OTHER; note = sugar modification: 2-fluororibose; note = backbone modification: 5'-phosphorothioate
  modified_base 16: mod_base = OTHER; note = backbone modification: 5'-phosphorothioate; note = sugar modification: 2'-O-methoxyethylribose; note = thymine
  modified_base 17: mod_base = m5c; mod_base = OTHER; note = sugar modification: 2'-O-methoxyethylribose; note = backbone modification: 5'-phosphorothioate
  modified_base 18: mod_base = OTHER; mod_base = m5c; note = sugar modification: 2'-O-methoxyethylribose
tgttcttgtacttcatcc

SEQ ID NO: 1190 - RNA, 18 nt, synthetic construct
  source 1..18: mol_type = other RNA; note = Antisense oligonucleotide
  modified_base 1: mod_base = OTHER; note = thymine; note = sugar modification: 2'-O-methoxyethylribose; note = backbone modification: 5'-phosphorothioate
  modified_base 2: mod_base = OTHER; note = sugar modification: 2'-O-methoxyethylribose; note = backbone modification: 5'-phosphorothioate
  modified_base 3: mod_base = OTHER; note = backbone modification: 5'-phosphorothioate; note = sugar modification: 2'-O-methoxyethylribose; note = thymine
  modified_base 4: mod_base = OTHER; note = thymine; note = sugar modification: 2'-O-methoxyethylribose; note = backbone modification: 5'-phosphorothioate
  modified_base 5: mod_base = OTHER; mod_base = m5c; note = sugar modification: 2-fluororibose; note = backbone modification: 5'-phosphorothioate
  modified_base 6: mod_base = OTHER; note = thymine; note = backbone modification: 5'-phosphorothioate; note = sugar modification: 2'-O-methoxyethylribose
  modified_base 7: mod_base = OTHER; note = thymine; note = sugar modification: 2'-O-methoxyethylribose; note = backbone modification: 5'-phosphorothioate
  modified_base 8: mod_base = OTHER; note = backbone modification: 5'-phosphorothioate; note = sugar modification: 2'-O-methoxyethylribose
  modified_base 9: mod_base = OTHER; note = thymine; note = sugar modification: 2'-O-methoxyethylribose; note = backbone modification: 5'-phosphorothioate
  modified_base 10: mod_base = OTHER; note = sugar modification: 2'-O-methoxyethylribose; note = backbone modification: 5'-phosphorothioate
  modified_base 11: mod_base = m5c; mod_base = OTHER; note = sugar modification: 2'-O-methoxyethylribose; note = backbone modification: 5'-phosphorothioate
  modified_base 12: mod_base = OTHER; note = thymine; note = sugar modification: 2'-O-methoxyethylribose; note = backbone modification: 5'-phosphorothioate
  modified_base 13: mod_base = OTHER; note = backbone modification: 5'-phosphorothioate; note = thymine; note = sugar modification: 2-fluororibose
  modified_base 14: mod_base = m5c; mod_base = OTHER; note = sugar modification: 2-fluororibose; note = backbone modification: 5'-phosphorothioate
  modified_base 15: mod_base = OTHER; note = sugar modification: 2-fluororibose; note = backbone modification: 5'-phosphorothioate
  modified_base 16: mod_base = OTHER; note = sugar modification: 2'-O-methoxyethylribose; note = backbone modification: 5'-phosphorothioate; note = thymine
  modified_base 17: mod_base = OTHER; mod_base = m5c; note = sugar modification: 2'-O-methoxyethylribose; note = backbone modification: 5'-phosphorothioate
  modified_base 18: mod_base = OTHER; mod_base = m5c; note = sugar modification: 2'-O-methoxyethylribose
tgttcttgtacttcatcc

SEQ ID NO: 1191 - RNA, 18 nt, synthetic construct
  source 1..18: mol_type = other RNA; note = Antisense oligonucleotide
  modified_base 1: mod_base = OTHER; note = backbone modification: 5'-phosphorothioate; note = sugar modification: 2'-O-methoxyethylribose; note = thymine
  modified_base 2: mod_base = OTHER; note = backbone modification: 5'-phosphorothioate; note = sugar modification: 2'-O-methoxyethylribose
  modified_base 3: mod_base = OTHER; note = thymine; note = backbone modification: 5'-phosphorothioate; note = sugar modification: 2'-O-methoxyethylribose
  modified_base 4: mod_base = OTHER; note = sugar modification: 2-fluororibose; note = backbone modification: 5'-phosphorothioate; note = thymine
  modified_base 5: mod_base = OTHER; mod_base = m5c; note = sugar modification: 2-fluororibose; note = backbone modification: 5'-phosphorothioate
  modified_base 6: mod_base = OTHER; note = backbone modification: 5'-phosphorothioate; note = sugar modification: 2'-O-methoxyethylribose; note = thymine
  modified_base 7: mod_base = OTHER; note = thymine; note = backbone modification: 5'-phosphorothioate; note = sugar modification: 2'-O-methoxyethylribose
  modified_base 8: mod_base = OTHER; note = backbone modification: 5'-phosphorothioate; note = sugar modification: 2'-O-methoxyethylribose
  modified_base 9: mod_base = OTHER; note = sugar modification: 2'-O-methoxyethylribose; note = thymine; note = backbone modification: 5'-phosphorothioate
  modified_base 10: mod_base = OTHER; note = backbone modification: 5'-phosphorothioate; note = sugar modification: 2'-O-methoxyethylribose
  modified_base 11: mod_base = m5c; mod_base = OTHER; note = sugar modification: 2'-O-methoxyethylribose; note = backbone modification: 5'-phosphorothioate
  modified_base 12: mod_base = OTHER; note = backbone modification: 5'-phosphorothioate; note = thymine; note = sugar modification: 2'-O-methoxyethylribose
  modified_base 13: mod_base = OTHER; note = backbone modification: 5'-phosphorothioate; note = thymine; note = sugar modification: 2-fluororibose
  modified_base 14: mod_base = m5c; mod_base = OTHER; note = backbone modification: 5'-phosphorothioate; note = sugar modification: 2-fluororibose
  modified_base 15: mod_base = OTHER; note = backbone modification: 5'-phosphorothioate; note = sugar modification: 2-fluororibose
  modified_base 16: mod_base = OTHER; note = thymine; note = sugar modification: 2'-O-methoxyethylribose; note = backbone modification: 5'-phosphorothioate
  modified_base 17: mod_base = m5c; mod_base = OTHER; note = backbone modification: 5'-phosphorothioate; note = sugar modification: 2'-O-methoxyethylribose
  modified_base 18: mod_base = OTHER; mod_base = m5c; note = sugar modification: 2'-O-methoxyethylribose
tgttcttgtacttcatcc

SEQ ID NO: 1192 - RNA, 18 nt, synthetic construct
  source 1..18: mol_type = other RNA; note = Antisense oligonucleotide
  modified_base 1: mod_base = OTHER; note = sugar modification: 2'-O-methoxyethylribose; note = thymine; note = backbone modification: 5'-phosphorothioate
  modified_base 2: mod_base = OTHER; note = sugar modification: 2'-O-methoxyethylribose; note = backbone modification: 5'-phosphorothioate
  modified_base 3: mod_base = OTHER; note = sugar modification: 2'-O-methoxyethylribose; note = backbone modification: 5'-phosphorothioate; note = thymine
  modified_base 4: mod_base = OTHER; note = thymine; note = backbone modification: 5'-phosphorothioate; note = sugar modification: 2-fluororibose
  modified_base 5: mod_base = m5c; mod_base = OTHER; note = sugar modification: 2-fluororibose; note = backbone modification: 5'-phosphorothioate
  modified_base 6: mod_base = OTHER; note = sugar modification: 2-fluororibose; note = backbone modification: 5'-phosphorothioate; note = thymine
  modified_base 7: mod_base = OTHER; note = sugar modification: 2'-O-methoxyethylribose; note = thymine; note = backbone modification: 5'-phosphorothioate
  modified_base 8: mod_base = OTHER; note = backbone modification: 5'-phosphorothioate; note = sugar modification: 2'-O-methoxyethylribose
  modified_base 9: mod_base = OTHER; note = sugar modification: 2'-O-methoxyethylribose; note = thymine; note = backbone modification: 5'-phosphorothioate
  modified_base 10: mod_base = OTHER; note = sugar modification: 2'-O-methoxyethylribose; note = backbone modification: 5'-phosphorothioate
  modified_base 11: mod_base = OTHER; mod_base = m5c; note = backbone modification: 5'-phosphorothioate; note = sugar modification: 2'-O-methoxyethylribose
  modified_base 12: mod_base = OTHER; note = backbone modification: 5'-phosphorothioate; note = thymine; note = sugar modification: 2'-O-methoxyethylribose
  modified_base 13: mod_base = OTHER; note = sugar modification: 2'-O-methoxyethylribose; note = thymine; note = backbone modification: 5'-phosphorothioate
  modified_base 14: mod_base = OTHER; mod_base = m5c; note = backbone modification: 5'-phosphorothioate; note = sugar modification: 2-fluororibose
  modified_base 15: mod_base = OTHER; note = backbone modification: 5'-phosphorothioate; note = sugar modification: 2'-O-methoxyethylribose
  modified_base 16: mod_base = OTHER; note = backbone modification: 5'-phosphorothioate; note = sugar modification: 2'-O-methoxyethylribose; note = thymine
  modified_base 17: mod_base = OTHER; mod_base = m5c; note = backbone modification: 5'-phosphorothioate; note = sugar modification: 2'-O-methoxyethylribose
  modified_base 18: mod_base = OTHER; mod_base = m5c; note = sugar modification: 2'-O-methoxyethylribose
tgttcttgtacttcatcc

SEQ ID NO: 1193 - RNA, 18 nt, synthetic construct
  source 1..18: mol_type = other RNA; note = Antisense oligonucleotide
  modified_base 1: mod_base = OTHER; note = sugar modification: 2'-O-methoxyethylribose; note = backbone modification: 5'-phosphorothioate; note = thymine
  modified_base 2: mod_base = OTHER; note = backbone modification: 5'-phosphorothioate; note = sugar modification: 2'-O-methoxyethylribose
  modified_base 3: mod_base = OTHER; note = sugar modification: 2'-O-methoxyethylribose; note = backbone modification: 5'-phosphorothioate; note = thymine
  modified_base 4: mod_base = OTHER; note = backbone modification: 5'-phosphorothioate; note = thymine; note = sugar modification: 2-fluororibose
  modified_base 5: mod_base = OTHER; mod_base = m5c; note = backbone modification: 5'-phosphorothioate; note = sugar modification: 2-fluororibose
  modified_base 6: mod_base = OTHER; note = backbone modification: 5'-phosphorothioate; note = thymine; note = sugar modification: 2-fluororibose
  modified_base 7: mod_base = OTHER; note = backbone modification: 5'-phosphorothioate; note = sugar modification: 2'-O-methoxyethylribose; note = thymine
  modified_base 8: mod_base = OTHER; note = backbone modification: 5'-phosphorothioate; note = sugar modification: 2'-O-methoxyethylribose
  modified_base 9: mod_base = OTHER; note = backbone modification: 5'-phosphorothioate; note = thymine; note = sugar modification: 2'-O-methoxyethylribose
  modified_base 10: mod_base = OTHER; note = sugar modification: 2'-O-methoxyethylribose; note = backbone modification: 5'-phosphorothioate
  modified_base 11: mod_base = OTHER; mod_base = m5c; note = sugar modification: 2'-O-methoxyethylribose; note = backbone modification: 5'-phosphorothioate
  modified_base 12: mod_base = OTHER; note = sugar modification: 2'-O-methoxyethylribose; note = thymine; note = backbone modification: 5'-phosphorothioate
  modified_base 13: mod_base = OTHER; note = thymine; note = sugar modification: 2'-O-methoxyethylribose; note = backbone modification: 5'-phosphorothioate
  modified_base 14: mod_base = OTHER; mod_base = m5c; note = backbone modification: 5'-phosphorothioate; note = sugar modification: 2-fluororibose
  modified_base 15: mod_base = OTHER; note = backbone modification: 5'-phosphorothioate; note = sugar modification: 2-fluororibose
  modified_base 16: mod_base = OTHER; note = backbone modification: 5'-phosphorothioate; note = thymine; note = sugar modification: 2'-O-methoxyethylribose
  modified_base 17: mod_base = m5c; mod_base = OTHER; note = backbone modification: 5'-phosphorothioate; note = sugar modification: 2'-O-methoxyethylribose
  modified_base 18: mod_base = m5c; mod_base = OTHER; note = sugar modification: 2'-O-methoxyethylribose
tgttcttgtacttcatcc

SEQ ID NO: 1194 - RNA, 18 nt, synthetic construct
  source 1..18: mol_type = other RNA; note = Antisense oligonucleotide
  modified_base 1: mod_base = OTHER; note = backbone modification: 5'-phosphorothioate; note = sugar modification: lna; note = thymine
  modified_base 2: mod_base = OTHER; note = backbone modification: 5'-phosphorothioate; note = sugar modification: 2'-O-methoxyethylribose
  modified_base 3: mod_base = OTHER; note = sugar modification: 2'-O-methoxyethylribose; note = thymine; note = backbone modification: 5'-phosphorothioate
  modified_base 4: mod_base = OTHER; note = sugar modification: 2-fluororibose; note = thymine; note = backbone modification: 5'-phosphorothioate
  modified_base 5: mod_base = OTHER; mod_base = m5c; note = backbone modification: 5'-phosphorothioate; note = sugar modification: 2-fluororibose
  modified_base 6: mod_base = OTHER; note = sugar modification: 2'-O-methoxyethylribose; note = backbone modification: 5'-phosphorothioate; note = thymine
  modified_base 7: mod_base = OTHER; note = thymine; note = backbone modification: 5'-phosphorothioate; note = sugar modification: 2'-O-methoxyethylribose
  modified_base 8: mod_base = OTHER; note = backbone modification: 5'-phosphorothioate; note = sugar modification: 2'-O-methoxyethylribose
  modified_base 9: mod_base = OTHER; note = thymine; note = backbone modification: 5'-phosphorothioate; note = sugar modification: 2-fluororibose
  modified_base 10: mod_base = OTHER; note = sugar modification: 2-fluororibose; note = backbone modification: 5'-phosphorothioate
  modified_base 11: mod_base = OTHER; mod_base = m5c; note = backbone modification: 5'-phosphorothioate; note = sugar modification: 2'-O-methoxyethylribose
  modified_base 12: mod_base = OTHER; note = sugar modification: 2'-O-methoxyethylribose; note = backbone modification: 5'-phosphorothioate; note = thymine
  modified_base 13: mod_base = OTHER; note = backbone modification: 5'-phosphorothioate; note = sugar modification: 2'-O-methoxyethylribose; note = thymine
  modified_base 14: mod_base = m5c; mod_base = OTHER; note = backbone modification: 5'-phosphorothioate; note = sugar modification: 2-fluororibose
  modified_base 15: mod_base = OTHER; note = backbone modification: 5'-phosphorothioate; note = sugar modification: 2-fluororibose
  modified_base 16: mod_base = OTHER; note = thymine; note = backbone modification: 5'-phosphorothioate; note = sugar modification: 2'-O-methoxyethylribose
  modified_base 17: mod_base = m5c; mod_base = OTHER; note = backbone modification: 5'-phosphorothioate; note = sugar modification: 2'-O-methoxyethylribose
  modified_base 18: mod_base = m5c; mod_base = OTHER; note = sugar modification: lna
tgttcttgtacttcatcc

SEQ ID NO: 1195 - RNA, 18 nt, synthetic construct
  source 1..18: mol_type = other RNA; note = Antisense oligonucleotide
  modified_base 1: mod_base = OTHER; note = backbone modification: 5'-phosphorothioate; note = sugar modification: lna; note = thymine
  modified_base 2: mod_base = OTHER; note = backbone modification: 5'-phosphorothioate; note = sugar modification: 2'-O-methoxyethylribose
  modified_base 3: mod_base = OTHER; note = thymine; note = backbone modification: 5'-phosphorothioate; note = sugar modification: 2'-O-methoxyethylribose
  modified_base 4: mod_base = OTHER; note = thymine; note = backbone modification: 5'-phosphorothioate; note = sugar modification: 2-fluororibose
  modified_base 5: mod_base = m5c; mod_base = OTHER; note = backbone modification: 5'-phosphorothioate; note = sugar modification: 2-fluororibose
  modified_base 6: mod_base = OTHER; note = sugar modification: 2-fluororibose; note = thymine; note = backbone modification: 5'-phosphorothioate
  modified_base 7: mod_base = OTHER; note = backbone modification: 5'-phosphorothioate; note = thymine; note = sugar modification: 2-fluororibose
  modified_base 8: mod_base = OTHER; note = backbone modification: 5'-phosphorothioate; note = sugar modification: 2'-O-methoxyethylribose
  modified_base 9: mod_base = OTHER; note = backbone modification: 5'-phosphorothioate; note = thymine; note = sugar modification: 2-fluororibose
  modified_base 10: mod_base = OTHER; note = sugar modification: 2-fluororibose; note = backbone modification: 5'-phosphorothioate
  modified_base 11: mod_base = m5c; mod_base = OTHER; note = backbone modification: 5'-phosphorothioate; note = sugar modification: 2'-O-methoxyethylribose
  modified_base 12: mod_base = OTHER; note = thymine; note = sugar modification: 2-fluororibose; note = backbone modification: 5'-phosphorothioate
  modified_base 13: mod_base = OTHER; note = backbone modification: 5'-phosphorothioate; note = thymine; note = sugar modification: 2-fluororibose
  modified_base 14: mod_base = OTHER; mod_base = m5c; note = sugar modification: 2-fluororibose; note = backbone modification: 5'-phosphorothioate
  modified_base 15: mod_base = OTHER; note = backbone modification: 5'-phosphorothioate; note = sugar modification: 2-fluororibose
  modified_base 16: mod_base = OTHER; note = backbone modification: 5'-phosphorothioate; note = sugar modification: 2'-O-methoxyethylribose; note = thymine
  modified_base 17: mod_base = OTHER; mod_base = m5c; note = sugar modification: 2'-O-methoxyethylribose; note = backbone modification: 5'-phosphorothioate
  modified_base 18: mod_base = m5c; mod_base = OTHER; note = sugar modification: lna
tgttcttgtacttcatcc

SEQ ID NO: 1196 - RNA, 18 nt, synthetic construct
  source 1..18: mol_type = other RNA; note = Antisense oligonucleotide
  modified_base 1: mod_base = OTHER; note = thymine; note = backbone modification: 5'-phosphorothioate; note = sugar modification: lna
  modified_base 2: mod_base = OTHER; note = sugar modification: 2'-O-methoxyethylribose; note = backbone modification: 5'-phosphorothioate
  modified_base 3: mod_base = OTHER; note = backbone modification: 5'-phosphorothioate; note = sugar modification: 2'-O-methoxyethylribose; note = thymine
  modified_base 4: mod_base = OTHER; note = backbone modification: 5'-phosphorothioate; note = sugar modification: 2-fluororibose; note = thymine
  modified_base 5: mod_base = OTHER; mod_base = m5c; note = sugar modification: 2-fluororibose; note = backbone modification: 5'-phosphorothioate
  modified_base 6: mod_base = OTHER; note = backbone modification: 5'-phosphorothioate; note = thymine; note = sugar modification: 2'-O-methoxyethylribose
  modified_base 7: mod_base = OTHER; note = backbone modification: 5'-phosphorothioate; note = sugar modification: 2'-O-methoxyethylribose; note = thymine
  modified_base 8: mod_base = OTHER; note = sugar modification: 2'-O-methoxyethylribose; note = backbone modification: 5'-phosphorothioate
  modified_base 9: mod_base = OTHER; note = thymine; note = sugar modification: 2'-O-methoxyethylribose; note = backbone modification: 5'-phosphorothioate
  modified_base 10: mod_base = OTHER; note = backbone modification: 5'-phosphorothioate; note = sugar modification: 2'-O-methoxyethylribose
  modified_base 11: mod_base = m5c; mod_base = OTHER; note = backbone modification: 5'-phosphorothioate; note = sugar modification: 2'-O-methoxyethylribose
  modified_base 12: mod_base = OTHER; note = backbone modification: 5'-phosphorothioate; note = sugar modification: 2'-O-methoxyethylribose; note = thymine
  modified_base 13: mod_base = OTHER; note = backbone modification: 5'-phosphorothioate; note = sugar modification: 2'-O-methoxyethylribose; note = thymine
  modified_base 14: mod_base = m5c; mod_base = OTHER; note = backbone modification: 5'-phosphorothioate; note = sugar modification: 2-fluororibose
  modified_base 15: mod_base = OTHER; note = backbone modification: 5'-phosphorothioate; note = sugar modification: 2-fluororibose
  modified_base 16: mod_base = OTHER; note = sugar modification: 2'-O-methoxyethylribose; note = thymine; note = backbone modification: 5'-phosphorothioate
  modified_base 17: mod_base = m5c; mod_base = OTHER; note = sugar modification: 2'-O-methoxyethylribose; note = backbone modification: 5'-phosphorothioate
  modified_base 18: mod_base = OTHER; mod_base = m5c; note = sugar modification: lna
tgttcttgtacttcatcc

SEQ ID NO: 1197 - RNA, 18 nt, synthetic construct
  source 1..18: mol_type = other RNA; note = Antisense oligonucleotide
  modified_base 1: mod_base = OTHER; note = backbone modification: 5'-phosphorothioate; note = thymine; note = sugar modification: lna
  modified_base 2: mod_base = OTHER; note = backbone modification: 5'-phosphorothioate; note = sugar modification: 2'-O-methoxyethylribose
  modified_base 3: mod_base = OTHER; note = thymine; note = sugar modification: 2'-O-methoxyethylribose; note = backbone modification: 5'-phosphorothioate
  modified_base 4: mod_base = OTHER; note = thymine; note = backbone modification: 5'-phosphorothioate; note = sugar modification: 2-fluororibose
  modified_base 5: mod_base = m5c; mod_base = OTHER; note = backbone modification: 5'-phosphorothioate; note = sugar modification: 2-fluororibose
  modified_base 6: mod_base = OTHER; note = thymine; note = sugar modification: 2'-O-methoxyethylribose; note = backbone modification: 5'-phosphorothioate
  modified_base 7: mod_base = OTHER; note = backbone modification: 5'-phosphorothioate; note = thymine; note = sugar modification: 2'-O-methoxyethylribose
  modified_base 8: mod_base = OTHER; note = backbone modification: 5'-phosphorothioate; note = sugar modification: 2'-O-methoxyethylribose
  modified_base 9: mod_base = OTHER; note = thymine; note = backbone modification: 5'-phosphorothioate; note = sugar modification: 2-fluororibose
  modified_base 10: mod_base = OTHER; note = sugar modification: 2-fluororibose; note = backbone modification: 5'-phosphorothioate
  modified_base 11: mod_base = m5c; mod_base = OTHER; note = backbone modification: 5'-phosphorothioate; note = sugar modification: 2'-O-methoxyethylribose
  modified_base 12: mod_base = OTHER; note = backbone modification: 5'-phosphorothioate; note = thymine; note = sugar modification: 2'-O-methoxyethylribose
  modified_base 13: mod_base = OTHER; note = sugar modification: 2'-O-methoxyethylribose; note = backbone modification: 5'-phosphorothioate; note = thymine
  modified_base 14: mod_base = OTHER; mod_base = m5c; note = backbone modification: 5'-phosphorothioate; note = sugar modification: 2'-O-methoxyethylribose
  modified_base 15: mod_base = OTHER; note = sugar modification: 2'-O-methoxyethylribose; note = backbone modification: 5'-phosphorothioate
  modified_base 16: mod_base = OTHER; note = thymine; note = sugar modification: 2'-O-methoxyethylribose; note = backbone modification: 5'-phosphorothioate
  modified_base 17: mod_base = m5c; mod_base = OTHER; note = backbone modification: 5'-phosphorothioate; note = sugar modification: 2'-O-methoxyethylribose
  modified_base 18: mod_base = OTHER; mod_base = m5c; note = sugar modification: lna
tgttcttgtacttcatcc

SEQ ID NO: 1198 - RNA, 18 nt, synthetic construct
  source 1..18: mol_type = other RNA; note = Antisense oligonucleotide
  modified_base 1: mod_base = OTHER; note = thymine; note = sugar modification: lna; note = backbone modification: 5'-phosphorothioate
  modified_base 2: mod_base = OTHER; note = sugar modification: 2'-O-methoxyethylribose; note = backbone modification: 5'-phosphorothioate
  modified_base 3: mod_base = OTHER; note = thymine; note = sugar modification: 2'-O-methoxyethylribose; note = backbone modification: 5'-phosphorothioate
  modified_base 4: mod_base = OTHER; note = thymine; note = backbone modification: 5'-phosphorothioate; note = sugar modification: 2'-O-methoxyethylribose
  modified_base 5: mod_base = OTHER; mod_base = m5c; note = sugar modification: 2'-O-methoxyethylribose; note = backbone modification: 5'-phosphorothioate
  modified_base 6: mod_base = OTHER; note = sugar modification: 2'-O-methoxyethylribose; note = backbone modification: 5'-phosphorothioate; note = thymine
  modified_base 7: mod_base = OTHER; note = backbone modification: 5'-phosphorothioate; note = sugar modification: 2'-O-methoxyethylribose; note = thymine
  modified_base 8: mod_base = OTHER; note = backbone modification: 5'-phosphorothioate; note = sugar modification: 2'-O-methoxyethylribose
  modified_base 9: mod_base = OTHER; note = backbone modification: 5'-phosphorothioate; note = thymine; note = sugar modification: 2-fluororibose
  modified_base 10: mod_base = OTHER; note = backbone modification: 5'-phosphorothioate; note = sugar modification: 2-fluororibose
  modified_base 11: mod_base = OTHER; mod_base = m5c; note = sugar modification: 2'-O-methoxyethylribose; note = backbone modification: 5'-phosphorothioate
  modified_base 12: mod_base = OTHER; note = thymine; note = backbone modification: 5'-phosphorothioate; note = sugar modification: 2'-O-methoxyethylribose
  modified_base 13: mod_base = OTHER; note = thymine; note = backbone modification: 5'-phosphorothioate; note = sugar modification: 2'-O-methoxyethylribose
  modified_base 14: mod_base = OTHER; mod_base = m5c; note = sugar modification: 2-fluororibose; note = backbone modification: 5'-phosphorothioate
  modified_base 15: mod_base = OTHER; note = sugar modification: 2-fluororibose; note = backbone modification: 5'-phosphorothioate
  modified_base 16: mod_base = OTHER; note = backbone modification: 5'-phosphorothioate; note = sugar modification: 2'-O-methoxyethylribose; note = thymine
  modified_base 17: mod_base = m5c; mod_base = OTHER; note = sugar modification: 2'-O-methoxyethylribose; note = backbone modification: 5'-phosphorothioate
  modified_base 18: mod_base = OTHER; mod_base = m5c; note = sugar modification: lna
tgttcttgtacttcatcc

SEQ ID NO: 1199 - RNA, 18 nt, synthetic construct
  source 1..18: mol_type = other RNA; note = Antisense oligonucleotide
  modified_base 1: mod_base = OTHER; note = thymine; note = sugar modification: lna; note = backbone modification: 5'-phosphorothioate
  modified_base 2: mod_base = OTHER; note = backbone modification: 5'-phosphorothioate; note = sugar modification: 2'-O-methoxyethylribose
  modified_base 3: mod_base = OTHER; note = backbone modification: 5'-phosphorothioate; note = thymine; note = sugar modification: 2'-O-methoxyethylribose
  modified_base 4: mod_base = OTHER; note = sugar modification: 2'-O-methoxyethylribose; note = thymine; note = backbone modification: 5'-phosphorothioate
  modified_base 5: mod_base = m5c; mod_base = OTHER; note = backbone modification: 5'-phosphorothioate; note = sugar modification: 2-fluororibose
  modified_base 6: mod_base = OTHER; note = sugar modification: 2-fluororibose; note = thymine; note = backbone modification: 5'-phosphorothioate
  modified_base 7: mod_base = OTHER; note = sugar modification: 2'-O-methoxyethylribose; note = backbone modification: 5'-phosphorothioate; note = thymine
  modified_base 8: mod_base = OTHER; note = backbone modification: 5'-phosphorothioate; note = sugar modification: 2'-O-methoxyethylribose
  modified_base 9: mod_base = OTHER; note = backbone modification: 5'-phosphorothioate; note = thymine; note = sugar modification: 2-fluororibose
  modified_base 10: mod_base = OTHER; note = sugar modification: 2-fluororibose; note = backbone modification: 5'-phosphorothioate
  modified_base 11: mod_base = OTHER; mod_base = m5c; note = backbone modification: 5'-phosphorothioate; note = sugar modification: 2'-O-methoxyethylribose
  modified_base 12: mod_base = OTHER; note = sugar modification: 2'-O-methoxyethylribose; note = backbone modification: 5'-phosphorothioate; note = thymine
  modified_base 13: mod_base = OTHER; note = sugar modification: 2-fluororibose; note = backbone modification: 5'-phosphorothioate; note = thymine
  modified_base 14: mod_base = OTHER; mod_base = m5c; note = backbone modification: 5'-phosphorothioate; note = sugar modification: 2-fluororibose
  modified_base 15: mod_base = OTHER; note = sugar modification: 2-fluororibose; note = backbone modification: 5'-phosphorothioate
  modified_base 16: mod_base = OTHER; note = sugar modification: 2'-O-methoxyethylribose; note = backbone modification: 5'-phosphorothioate; note = thymine
  modified_base 17: mod_base = m5c; mod_base = OTHER; note = backbone modification: 5'-phosphorothioate; note = sugar modification: 2'-O-methoxyethylribose
  modified_base 18: mod_base = OTHER; mod_base = m5c; note = sugar modification: lna
tgttcttgtacttcatcc

SEQ ID NO: 1200 - RNA, 18 nt, synthetic construct
  source 1..18: mol_type = other RNA; note = Antisense oligonucleotide
  modified_base 1: mod_base = OTHER; note = backbone modification: 5'-phosphorothioate; note = thymine; note = sugar modification: lna
  modified_base 2: mod_base = OTHER; note = backbone modification: 5'-phosphorothioate; note = sugar modification: 2'-O-methoxyethylribose
  modified_base 3: mod_base = OTHER; note = sugar modification: 2'-O-methoxyethylribose; note = thymine; note = backbone modification: 5'-phosphorothioate
  modified_base 4: mod_base = OTHER; note = backbone modification: 5'-phosphorothioate; note = thymine; note = sugar modification: 2'-O-methoxyethylribose
  modified_base 5: mod_base = m5c; mod_base = OTHER; note = sugar modification: 2-fluororibose; note = backbone modification: 5'-phosphorothioate
  modified_base 6: mod_base = OTHER; note = thymine; note = sugar modification: 2-fluororibose; note = backbone modification: 5'-phosphorothioate
  modified_base 7: mod_base = OTHER; note = thymine; note = sugar modification: 2-fluororibose; note = backbone modification: 5'-phosphorothioate
  modified_base 8: mod_base = OTHER; note = backbone modification: 5'-phosphorothioate; note = sugar modification: 2'-O-methoxyethylribose
  modified_base 9: mod_base = OTHER; note = sugar modification: 2-fluororibose; note = backbone modification: 5'-phosphorothioate; note = thymine
  modified_base 10: mod_base = OTHER; note = backbone modification: 5'-phosphorothioate; note = sugar modification: 2-fluororibose
  modified_base 11: mod_base = m5c; mod_base = OTHER; note = backbone modification: 5'-phosphorothioate; note = sugar modification: 2'-O-methoxyethylribose
  modified_base 12: mod_base = OTHER; note = thymine; note = backbone modification: 5'-phosphorothioate; note = sugar modification: 2'-O-methoxyethylribose
  modified_base 13: mod_base = OTHER; note = sugar modification: 2'-O-methoxyethylribose; note = backbone modification: 5'-phosphorothioate; note = thymine
  modified_base 14: mod_base = m5c; mod_base = OTHER; note = backbone modification: 5'-phosphorothioate; note = sugar modification: 2-fluororibose
  modified_base 15: mod_base = OTHER; note = backbone modification: 5'-phosphorothioate; note = sugar modification: 2-fluororibose
  modified_base 16: mod_base = OTHER; note = thymine; note = backbone modification: 5'-phosphorothioate; note = sugar modification: 2'-O-methoxyethylribose
  modified_base 17: mod_base = OTHER; mod_base = m5c; note = backbone modification: 5'-phosphorothioate; note = sugar modification: 2'-O-methoxyethylribose
  modified_base 18: mod_base = m5c; mod_base = OTHER; note = sugar modification: lna
tgttcttgtacttcatcc

SEQ ID NO: 1201 - RNA, 18 nt, synthetic construct
  source 1..18: mol_type = other RNA; note = Antisense oligonucleotide
  modified_base 1: mod_base = OTHER; note = backbone modification: 5'-phosphorothioate; note = sugar modification: lna; note = thymine
  modified_base 2: mod_base = OTHER; note = sugar modification: 2'-O-methoxyethylribose; note = backbone modification: 5'-phosphorothioate
  modified_base 3: mod_base = OTHER; note = thymine; note = sugar modification: 2'-O-methoxyethylribose; note = backbone modification: 5'-phosphorothioate
  modified_base 4: mod_base = OTHER; note = backbone modification: 5'-phosphorothioate; note = thymine; note = sugar modification: 2-fluororibose
  modified_base 5: mod_base = m5c; mod_base = OTHER; note = sugar modification: 2-fluororibose; note = backbone modification: 5'-phosphorothioate
  modified_base 6: mod_base = OTHER; note = thymine; note = sugar modification: 2'-O-methoxyethylribose; note = backbone modification: 5'-phosphorothioate
  modified_base 7: mod_base = OTHER; note = backbone modification: 5'-phosphorothioate; note = thymine; note = sugar modification: 2'-O-methoxyethylribose
  modified_base 8: mod_base = OTHER; note = backbone modification: 5'-phosphorothioate; note = sugar modification: 2'-O-methoxyethylribose
  modified_base 9: mod_base = OTHER; note = sugar modification: 2'-O-methoxyethylribose; note = backbone modification: 5'-phosphorothioate; note = thymine
  modified_base 10: mod_base = OTHER; note = backbone modification: 5'-phosphorothioate; note = sugar modification: 2'-O-methoxyethylribose
  modified_base 11: mod_base = OTHER; mod_base = m5c; note = sugar modification: 2'-O-methoxyethylribose; note = backbone modification: 5'-phosphorothioate
  modified_base 12: mod_base = OTHER; note = sugar modification: 2'-O-methoxyethylribose; note = backbone modification: 5'-phosphorothioate; note = thymine
  modified_base 13: mod_base = OTHER; note = sugar modification: 2'-O-methoxyethylribose; note = backbone modification: 5'-phosphorothioate; note = thymine
  modified_base 14: mod_base = m5c; mod_base = OTHER; note = sugar modification: 2'-O-methoxyethylribose; note = backbone modification: 5'-phosphorothioate
  modified_base 15: mod_base = OTHER; note = backbone modification: 5'-phosphorothioate; note = sugar modification: 2'-O-methoxyethylribose
  modified_base 16: mod_base = OTHER; note = backbone modification: 5'-phosphorothioate; note = thymine; note = sugar modification: 2'-O-methoxyethylribose
  modified_base 17: mod_base = OTHER; mod_base = m5c; note = backbone modification: 5'-phosphorothioate; note = sugar modification: 2'-O-methoxyethylribose
  modified_base 18: mod_base = OTHER; mod_base = m5c; note = sugar modification: lna
tgttcttgtacttcatcc

SEQ ID NO: 1202 - RNA, 18 nt, synthetic construct
  source 1..18: mol_type = other RNA; note = Antisense oligonucleotide
  modified_base 1: mod_base = OTHER; note = sugar modification: lna; note = backbone modification: 5'-phosphorothioate; note = thymine
  modified_base 2: mod_base = OTHER; note = sugar modification: 2'-O-methoxyethylribose; note = backbone modification: 5'-phosphorothioate
  modified_base 3: mod_base = OTHER; note = thymine; note = sugar modification: 2'-O-methoxyethylribose; note = backbone modification: 5'-phosphorothioate
  modified_base 4: mod_base = OTHER; note = backbone modification: 5'-phosphorothioate; note = thymine; note = sugar modification: 2'-O-methoxyethylribose
  modified_base 5: mod_base = m5c; mod_base = OTHER; note = backbone modification: 5'-phosphorothioate; note = sugar modification: 2'-O-methoxyethylribose
  modified_base 6: mod_base = OTHER; note = backbone modification: 5'-phosphorothioate; note = sugar modification: 2'-O-methoxyethylribose; note = thymine
  modified_base 7: mod_base = OTHER; note = backbone modification: 5'-phosphorothioate; note = thymine; note = sugar modification: 2'-O-methoxyethylribose
  modified_base 8: mod_base = OTHER; note = backbone modification: 5'-phosphorothioate; note = sugar modification: 2'-O-methoxyethylribose
  modified_base 9: mod_base = OTHER; note = backbone modification: 5'-phosphorothioate; note = thymine; note = sugar modification: 2'-O-methoxyethylribose
  modified_base 10: mod_base = OTHER; note = backbone modification: 5'-phosphorothioate; note = sugar modification: 2'-O-methoxyethylribose
  modified_base 11: mod_base = m5c; mod_base = OTHER; note = backbone modification: 5'-phosphorothioate; note = sugar modification: 2'-O-methoxyethylribose
  modified_base 12: mod_base = OTHER; note = sugar modification: 2'-O-methoxyethylribose; note = backbone modification: 5'-phosphorothioate; note = thymine
  modified_base 13: mod_base = OTHER; note = thymine; note = backbone modification: 5'-phosphorothioate; note = sugar modification: 2'-O-methoxyethylribose
  modified_base 14: mod_base = OTHER; mod_base = m5c; note = backbone modification: 5'-phosphorothioate; note = sugar modification: 2-fluororibose
  modified_base 15: mod_base = OTHER; note = sugar modification: 2-fluororibose; note = backbone modification: 5'-phosphorothioate
  modified_base 16: mod_base = OTHER; note = thymine; note = backbone modification: 5'-phosphorothioate; note = sugar modification: 2'-O-methoxyethylribose
  modified_base 17: mod_base = m5c; mod_base = OTHER; note = sugar modification: 2'-O-methoxyethylribose; note = backbone modification: 5'-phosphorothioate
  modified_base 18: mod_base = OTHER; mod_base = m5c; note = sugar modification: lna
tgttcttgtacttcatcc

SEQ ID NO: 1203 - RNA, 18 nt, synthetic construct
  source 1..18: mol_type = other RNA; note = Antisense oligonucleotide
  modified_base 1: mod_base = OTHER; note = thymine; note = backbone modification: 5'-phosphorothioate; note = sugar modification: lna
  modified_base 2: mod_base = OTHER; note = backbone modification: 5'-phosphorothioate; note = sugar modification: 2'-O-methoxyethylribose
  modified_base 3: mod_base = OTHER; note = thymine; note = sugar modification: 2'-O-methoxyethylribose; note = backbone modification: 5'-phosphorothioate
  modified_base 4: mod_base = OTHER; note = thymine; note = backbone modification: 5'-phosphorothioate; note = sugar modification: 2'-O-methoxyethylribose
  modified_base 5: mod_base = OTHER; mod_base = m5c; note = sugar modification: 2-fluororibose; note = backbone modification: 5'-phosphorothioate
  modified_base 6: mod_base = OTHER; note = sugar modification: 2-fluororibose; note = backbone modification: 5'-phosphorothioate; note = thymine
  modified_base 7: mod_base = OTHER; note = thymine; note = backbone modification: 5'-phosphorothioate; note = sugar modification: 2'-O-methoxyethylribose
  modified_base 8: mod_base = OTHER; note = backbone modification: 5'-phosphorothioate; note = sugar modification: 2'-O-methoxyethylribose
  modified_base 9: mod_base = OTHER; note = sugar modification: 2'-O-methoxyethylribose; note = backbone modification: 5'-phosphorothioate; note = thymine
  modified_base 10: mod_base = OTHER; note = sugar modification: 2'-O-methoxyethylribose; note = backbone modification: 5'-phosphorothioate
  modified_base 11: mod_base = m5c; mod_base = OTHER; note = sugar modification: 2'-O-methoxyethylribose; note = backbone modification: 5'-phosphorothioate
  modified_base 12: mod_base = OTHER; note = thymine; note = sugar modification: 2'-O-methoxyethylribose; note = backbone modification: 5'-phosphorothioate
  modified_base 13: mod_base = OTHER; note = sugar modification: 2-fluororibose; note = thymine; note = backbone modification: 5'-phosphorothioate
  modified_base 14: mod_base = m5c; mod_base = OTHER; note = backbone modification: 5'-phosphorothioate; note = sugar modification: 2-fluororibose
  modified_base 15: mod_base = OTHER; note = sugar modification: 2-fluororibose; note = backbone modification: 5'-phosphorothioate
  modified_base 16: mod_base = OTHER; note = sugar modification: 2'-O-methoxyethylribose; note = backbone modification: 5'-phosphorothioate; note = thymine
  modified_base 17: mod_base = m5c; mod_base = OTHER; note = backbone modification: 5'-phosphorothioate; note = sugar modification: 2'-O-methoxyethylribose
  modified_base 18: mod_base = OTHER; mod_base = m5c; note = sugar modification: lna
tgttcttgtacttcatcc

SEQ ID NO: 1204 - RNA, 18 nt, synthetic construct
  source 1..18: mol_type = other RNA; note = Antisense oligonucleotide
  modified_base 1: mod_base = OTHER; note = backbone modification: 5'-phosphorothioate; note = sugar modification: lna; note = thymine
  modified_base 2: mod_base = OTHER; note = backbone modification: 5'-phosphorothioate; note = sugar modification: 2'-O-methoxyethylribose
  modified_base 3: mod_base = OTHER; note = sugar modification: 2'-O-methoxyethylribose; note = thymine; note = backbone modification: 5'-phosphorothioate
  modified_base 4: mod_base = OTHER; note = backbone modification: 5'-phosphorothioate; note = thymine; note = sugar modification: 2'-O-methoxyethylribose
  modified_base 5: mod_base = m5c; mod_base = OTHER; note = sugar modification: 2-fluororibose; note = backbone modification: 5'-phosphorothioate
  modified_base 6: mod_base = OTHER; note = thymine; note = backbone modification: 5'-phosphorothioate; note = sugar modification: 2-fluororibose
  modified_base 7: mod_base = OTHER; note = backbone modification: 5'-phosphorothioate; note = sugar modification: 2-fluororibose; note = thymine
  modified_base 8: mod_base = OTHER; note = sugar modification: 2'-O-methoxyethylribose; note = backbone modification: 5'-phosphorothioate
  modified_base 9: mod_base = OTHER; note = thymine; note = backbone modification: 5'-phosphorothioate; note = sugar modification: 2'-O-methoxyethylribose
  modified_base 10: mod_base = OTHER; note = backbone modification: 5'-phosphorothioate; note = sugar modification: 2'-O-methoxyethylribose
  modified_base 11: mod_base = OTHER; mod_base = m5c; note = sugar modification: 2'-O-methoxyethylribose; note = backbone modification: 5'-phosphorothioate
  modified_base 12: mod_base = OTHER; note = thymine; note = backbone modification: 5'-phosphorothioate; note = sugar modification: 2'-O-methoxyethylribose
  modified_base 13: mod_base = OTHER; note = thymine; note = sugar modification: 2'-O-methoxyethylribose; note = backbone modification: 5'-phosphorothioate
  modified_base 14: mod_base = m5c; mod_base = OTHER; note = sugar modification: 2-fluororibose; note = backbone modification: 5'-phosphorothioate
  modified_base 15: mod_base = OTHER; note = backbone modification: 5'-phosphorothioate; note = sugar modification: 2-fluororibose
  modified_base 16: mod_base = OTHER; note = sugar modification: 2'-O-methoxyethylribose; note = thymine; note = backbone modification: 5'-phosphorothioate
  modified_base 17: mod_base = OTHER; mod_base = m5c; note = backbone modification: 5'-phosphorothioate; note = sugar modification: 2'-O-methoxyethylribose
  modified_base 18: mod_base = m5c; mod_base = OTHER; note = sugar modification: lna
tgttcttgtacttcatcc

SEQ ID NO: 1205 - RNA, 18 nt, synthetic construct
  source 1..18: mol_type = other RNA; note = Antisense oligonucleotide
  modified_base 1: mod_base = OTHER; note = sugar modification: lna; note = thymine; note = backbone modification: 5'-phosphorothioate
  modified_base 2: mod_base = OTHER; note = backbone modification: 5'-phosphorothioate; note = sugar modification: lna
  modified_base 3: mod_base = OTHER; note = sugar modification: 2-fluororibose; note = backbone modification: 5'-phosphorothioate; note = thymine
  modified_base 4: mod_base = OTHER; note = backbone modification: 5'-phosphorothioate; note = sugar modification: 2-fluororibose; note = thymine
  modified_base 5: mod_base = m5c; mod_base = OTHER; note = backbone modification: 5'-phosphorothioate; note = sugar modification: 2-fluororibose
  modified_base 6: mod_base = OTHER; note = thymine; note = sugar modification: 2-fluororibose; note = backbone modification: 5'-phosphorothioate
  modified_base 7: mod_base = OTHER; note = thymine; note = backbone modification: 5'-phosphorothioate; note = sugar modification: 2-fluororibose
  modified_base 8: mod_base = OTHER; note = backbone modification: 5'-phosphorothioate; note = sugar modification: 2-fluororibose
  modified_base 9: mod_base = OTHER; note = sugar modification: 2-fluororibose; note = thymine; note = backbone modification: 5'-phosphorothioate
  modified_base 10: mod_base = OTHER; note = sugar modification: 2-fluororibose; note = backbone modification: 5'-phosphorothioate
  modified_base 11: mod_base = m5c; mod_base = OTHER; note = sugar modification: 2-fluororibose; note = backbone modification: 5'-phosphorothioate
  modified_base 12: mod_base = OTHER; note = backbone modification: 5'-phosphorothioate; note = sugar modification: 2-fluororibose; note = thymine
  modified_base 13: mod_base = OTHER; note = sugar modification: 2-fluororibose; note = backbone modification: 5'-phosphorothioate; note = thymine
  modified_base 14: mod_base = OTHER; mod_base = m5c; note = sugar modification: 2-fluororibose; note = backbone modification: 5'-phosphorothioate
  modified_base 15: mod_base = OTHER; note = backbone modification: 5'-phosphorothioate; note = sugar modification: 2-fluororibose
  modified_base 16: mod_base = OTHER; note = thymine; note = backbone modification: 5'-phosphorothioate; note = sugar modification: 2-fluororibose
  modified_base 17: mod_base = OTHER; mod_base = m5c; note = backbone modification: 5'-phosphorothioate; note = sugar modification: lna
  modified_base 18: mod_base = OTHER; mod_base = m5c; note = sugar modification: lna
tgttcttgtacttcatcc

SEQ ID NO: 1206 - RNA, 18 nt, synthetic construct
  source 1..18: mol_type = other RNA; note = Antisense oligonucleotide
  modified_base 1: mod_base = OTHER; note = thymine; note = backbone modification: 5'-phosphorothioate; note = sugar modification: lna
  modified_base 2: mod_base = OTHER; note = sugar modification: lna; note = backbone modification: 5'-phosphorothioate
  modified_base 3: mod_base = OTHER; note = thymine; note = sugar modification: lna; note = backbone modification: 5'-phosphorothioate
  modified_base 4: mod_base = OTHER; note = thymine; note = sugar modification: 2-fluororibose; note = backbone modification: 5'-phosphorothioate
  modified_base 5: mod_base = OTHER; mod_base = m5c; note = backbone modification: 5'-phosphorothioate; note = sugar modification: 2-fluororibose
  modified_base 6: mod_base = OTHER; note = sugar modification: 2-fluororibose; note = thymine; note = backbone modification: 5'-phosphorothioate
  modified_base 7: mod_base = OTHER; note = thymine; note = backbone modification: 5'-phosphorothioate; note = sugar modification: 2-fluororibose
  modified_base 8: mod_base = OTHER; note = backbone modification: 5'-phosphorothioate; note = sugar modification: 2-fluororibose
  modified_base 9: mod_base = OTHER; note = thymine; note = sugar modification: 2-fluororibose; note = backbone modification: 5'-phosphorothioate
  modified_base 10: mod_base = OTHER; note = sugar modification: 2-fluororibose; note = backbone modification: 5'-phosphorothioate
  modified_base 11: mod_base = OTHER; mod_base = m5c; note = backbone modification: 5'-phosphorothioate; note = sugar modification: 2-fluororibose
  modified_base 12: mod_base = OTHER; note = backbone modification: 5'-phosphorothioate; note = sugar modification: 2-fluororibose; note = thymine
  modified_base 13: mod_base = OTHER; note = sugar modification: 2-fluororibose; note = thymine; note = backbone modification: 5'-phosphorothioate
  modified_base 14: mod_base = m5c; mod_base = OTHER; note = backbone modification: 5'-phosphorothioate; note = sugar modification: 2-fluororibose
  modified_base 15: mod_base = OTHER; note = backbone modification: 5'-phosphorothioate; note = sugar modification: 2-fluororibose
  modified_base 16: mod_base = OTHER; note = thymine; note = backbone modification: 5'-phosphorothioate; note = sugar modification: lna
  modified_base 17: mod_base = m5c; mod_base = OTHER; note = backbone modification: 5'-phosphorothioate; note = sugar modification: lna
  modified_base 18: mod_base = m5c; mod_base = OTHER; note = sugar modification: lna
tgttcttgtacttcatcc

SEQ ID NO: 1207 - RNA, 18 nt, synthetic construct
  source 1..18: mol_type = other RNA; note = Antisense oligonucleotide
  modified_base 1: mod_base = OTHER; note = backbone modification: 5'-phosphorothioate; note = sugar modification: lna; note = thymine
  modified_base 2: mod_base = OTHER; note = sugar modification: lna; note = backbone modification: 5'-phosphorothioate
  modified_base 3: mod_base = OTHER; note = thymine; note = sugar modification: lna; note = backbone modification: 5'-phosphorothioate
  modified_base 4: mod_base = OTHER; note = sugar modification: lna; note = thymine; note = backbone modification: 5'-phosphorothioate
  modified_base 5: mod_base = OTHER; mod_base = m5c; note = backbone modification: 5'-phosphorothioate; note = sugar modification: 2-fluororibose
  modified_base 6: mod_base = OTHER; note = sugar modification: 2-fluororibose; note = thymine; note = backbone modification: 5'-phosphorothioate
  modified_base 7: mod_base = OTHER; note = thymine; note = backbone modification: 5'-phosphorothioate; note = sugar modification: 2-fluororibose
  modified_base 8: mod_base = OTHER; note = backbone modification: 5'-phosphorothioate; note = sugar modification: 2-fluororibose
  modified_base 9: mod_base = OTHER; note = sugar modification: 2-fluororibose; note = thymine; note = backbone modification: 5'-phosphorothioate
  modified_base 10: mod_base = OTHER; note = backbone modification: 5'-phosphorothioate; note = sugar modification: 2-fluororibose
  modified_base 11: mod_base = m5c; mod_base = OTHER; note = backbone modification: 5'-phosphorothioate; note = sugar modification: 2-fluororibose
  modified_base 12: mod_base = OTHER; note = thymine; note = backbone modification: 5'-phosphorothioate; note = sugar modification: 2-fluororibose
  modified_base 13: mod_base = OTHER; note = sugar modification: 2-fluororibose; note = thymine; note = backbone modification: 5'-phosphorothioate
  modified_base 14: mod_base = m5c; mod_base = OTHER; note = sugar modification: 2-fluororibose; note = backbone modification: 5'-phosphorothioate
  modified_base 15: mod_base = OTHER; note = backbone modification: 5'-phosphorothioate; note = sugar modification: lna
  modified_base 16: mod_base = OTHER; note = sugar modification: lna; note = thymine; note = backbone modification: 5'-phosphorothioate
  modified_base 17: mod_base = OTHER; mod_base = m5c; note = sugar modification: lna; note = backbone modification: 5'-phosphorothioate
  modified_base 18: mod_base = m5c; mod_base = OTHER; note = sugar modification: lna
tgttcttgtacttcatcc

SEQ ID NO: 1208 - RNA, 18 nt, synthetic construct
  source 1..18: mol_type = other RNA; note = Antisense oligonucleotide
  modified_base 1: mod_base = OTHER; note = thymine; note = backbone modification: 5'-phosphorothioate; note = sugar modification: lna
  modified_base 2: mod_base = OTHER; note = sugar modification: lna; note = backbone modification: 5'-phosphorothioate
  modified_base 3: mod_base = OTHER; note = thymine; note = backbone modification: 5'-phosphorothioate; note = sugar modification: lna
  modified_base 4: mod_base = OTHER; note = thymine; note = sugar modification: lna; note = backbone modification: 5'-phosphorothioate
  modified_base 5: mod_base = OTHER; mod_base = m5c; note = backbone modification: 5'-phosphorothioate; note = sugar modification: lna
  modified_base 6: mod_base = OTHER; note = backbone modification: 5'-phosphorothioate; note = sugar modification: 2-fluororibose; note = thymine
  modified_base 7: mod_base = OTHER; note = thymine; note = backbone modification: 5'-phosphorothioate; note = sugar modification: 2-fluororibose
  modified_base 8: mod_base = OTHER; note = backbone modification: 5'-phosphorothioate; note = sugar modification: 2-fluororibose
  modified_base 9: mod_base = OTHER; note = backbone modification: 5'-phosphorothioate; note = sugar modification: 2-fluororibose; note = thymine
  modified_base 10: mod_base = OTHER; note = sugar modification: 2-fluororibose; note = backbone modification: 5'-phosphorothioate
  modified_base 11: mod_base = OTHER; mod_base = m5c; note = sugar modification: 2-fluororibose; note = backbone modification: 5'-phosphorothioate
  modified_base 12: mod_base = OTHER; note = sugar modification: 2-fluororibose; note = thymine; note = backbone modification: 5'-phosphorothioate
  modified_base 13: mod_base = OTHER; note = sugar modification: 2-fluororibose; note = backbone modification: 5'-phosphorothioate; note = thymine
  modified_base 14: mod_base = m5c; mod_base = OTHER; note = sugar modification: lna; note = backbone modification: 5'-phosphorothioate
  modified_base 15: mod_base = OTHER; note = sugar modification: lna; note = backbone modification: 5'-phosphorothioate
  modified_base 16: mod_base = OTHER; note = backbone modification: 5'-phosphorothioate; note = thymine; note = sugar modification: lna
  modified_base 17: mod_base = OTHER; mod_base = m5c; note = backbone modification: 5'-phosphorothioate; note = sugar modification: lna
  modified_base 18: mod_base = m5c; mod_base = OTHER; note = sugar modification: lna
tgttcttgtacttcatcc

SEQ ID NO: 1209 - RNA, 18 nt, synthetic construct
  source 1..18: mol_type = other RNA; note = Antisense oligonucleotide
  modified_base 1: mod_base = OTHER; note = thymine; note = sugar modification: lna; note = backbone modification: 5'-phosphorothioate
  modified_base 2: mod_base = OTHER; note = backbone modification: 5'-phosphorothioate; note = sugar modification: lna
  modified_base 3: mod_base = OTHER; note = backbone modification: 5'-phosphorothioate; note = thymine; note = sugar modification: 2'-O-methoxyethylribose
  modified_base 4: mod_base = OTHER; note = thymine; note = sugar modification: 2'-O-methoxyethylribose; note = backbone modification: 5'-phosphorothioate
  modified_base 5: mod_base = OTHER; mod_base = m5c; note = sugar modification: 2'-O-methoxyethylribose; note = backbone modification: 5'-phosphorothioate
  modified_base 6: mod_base = OTHER; note = sugar modification: 2'-O-methoxyethylribose; note = thymine; note = backbone modification: 5'-phosphorothioate
  modified_base 7: mod_base = OTHER; note = sugar modification: 2'-O-methoxyethylribose; note = backbone modification: 5'-phosphorothioate; note = thymine
  modified_base 8: mod_base = OTHER; note = backbone modification: 5'-phosphorothioate; note = sugar modification: 2-fluororibose
  modified_base 9: mod_base = OTHER; note = sugar modification: 2-fluororibose; note = thymine; note = backbone modification: 5'-phosphorothioate
  modified_base 10: mod_base = OTHER; note = sugar modification: 2-fluororibose; note = backbone modification: 5'-phosphorothioate
  modified_base 11: mod_base = m5c; mod_base = OTHER; note = sugar modification: 2-fluororibose; note = backbone modification: 5'-phosphorothioate
  modified_base 12: mod_base = OTHER; note = thymine; note = backbone modification: 5'-phosphorothioate; note = sugar modification: 2'-O-methoxyethylribose
  modified_base 13: mod_base = OTHER; note = sugar modification: 2'-O-methoxyethylribose; note = thymine; note = backbone modification: 5'-phosphorothioate
  modified_base 14: mod_base = m5c; mod_base = OTHER; note = backbone modification: 5'-phosphorothioate; note = sugar modification: 2'-O-methoxyethylribose
  modified_base 15: mod_base = OTHER; note = sugar modification: 2'-O-methoxyethylribose; note = backbone modification: 5'-phosphorothioate
  modified_base 16: mod_base = OTHER; note = backbone modification: 5'-phosphorothioate; note = thymine; note = sugar modification: 2'-O-methoxyethylribose
  modified_base 17: mod_base = OTHER; mod_base = m5c; note = sugar modification: lna; note = backbone modification: 5'-phosphorothioate
  modified_base 18: mod_base = OTHER; mod_base = m5c; note = sugar modification: lna
tgttcttgtacttcatcc

SEQ ID NO: 1210 - RNA, 18 nt, synthetic construct
  source 1..18: mol_type = other RNA; note = Antisense oligonucleotide
  modified_base 1: mod_base = OTHER; note = thymine; note = backbone modification: 5'-phosphorothioate; note = sugar modification: lna
  modified_base 2: mod_base = OTHER; note = backbone modification: 5'-phosphorothioate; note = sugar modification: lna
  modified_base 3: mod_base = OTHER; note = thymine; note = backbone modification: 5'-phosphorothioate; note = sugar modification: 2'-O-methoxyethylribose
  modified_base 4: mod_base = OTHER; note = backbone modification: 5'-phosphorothioate; note = sugar modification: 2'-O-methoxyethylribose; note = thymine
  modified_base 5: mod_base = m5c; mod_base = OTHER; note = backbone modification: 5'-phosphorothioate; note = sugar modification: 2'-O-methoxyethylribose
  modified_base 6: mod_base = OTHER; note = thymine; note = backbone modification: 5'-phosphorothioate; note = sugar modification: 2'-O-methoxyethylribose
  modified_base 7: mod_base = OTHER; note = backbone modification: 5'-phosphorothioate; note = sugar modification: 2-fluororibose; note = thymine
  modified_base 8: mod_base = OTHER; note = backbone modification: 5'-phosphorothioate; note = sugar modification: 2-fluororibose
  modified_base 9: mod_base = OTHER; note = backbone modification: 5'-phosphorothioate; note = sugar modification: 2-fluororibose; note = thymine
  modified_base 10: mod_base = OTHER; note = backbone modification: 5'-phosphorothioate; note = sugar modification: 2-fluororibose
  modified_base 11: mod_base = OTHER; mod_base = m5c; note = sugar modification: 2-fluororibose; note = backbone modification: 5'-phosphorothioate
  modified_base 12: mod_base = OTHER; note = thymine; note = sugar modification: 2-fluororibose; note = backbone modification: 5'-phosphorothioate
  modified_base 13: mod_base = OTHER; note = backbone modification: 5'-phosphorothioate; note = sugar modification: 2'-O-methoxyethylribose; note = thymine
  modified_base 14: mod_base = m5c; mod_base = OTHER; note = backbone modification: 5'-phosphorothioate; note = sugar modification: 2'-O-methoxyethylribose
  modified_base 15: mod_base = OTHER; note = sugar modification: 2'-O-methoxyethylribose; note = backbone modification: 5'-phosphorothioate
  modified_base 16: mod_base = OTHER; note = sugar modification: 2'-O-methoxyethylribose; note = backbone modification: 5'-phosphorothioate; note = thymine
  modified_base 17: mod_base = m5c; mod_base = OTHER; note = backbone modification: 5'-phosphorothioate; note = sugar modification: lna
  modified_base 18: mod_base = OTHER; mod_base = m5c; note = sugar modification: lna
tgttcttgtacttcatcc

SEQ ID NO: 1211 - RNA, 18 nt, synthetic construct
  source 1..18: mol_type = other RNA; note = Antisense oligonucleotide
  modified_base 1: mod_base = OTHER; note = backbone modification: 5'-phosphorothioate; note = thymine; note = sugar modification: lna
  modified_base 2: mod_base = OTHER; note = sugar modification: lna; note = backbone modification: 5'-phosphorothioate
  modified_base 3: mod_base = OTHER; note = backbone modification: 5'-phosphorothioate; note = sugar modification: 2'-O-methoxyethylribose; note = thymine
  modified_base 4: mod_base = OTHER; note = sugar modification: 2'-O-methoxyethylribose; note = thymine; note = backbone modification: 5'-phosphorothioate
  modified_base 5: mod_base = OTHER; mod_base = m5c; note = backbone modification: 5'-phosphorothioate; note = sugar modification: 2'-O-methoxyethylribose
  modified_base 6: mod_base = OTHER; note = sugar modification: 2-fluororibose; note = thymine; note = backbone modification: 5'-phosphorothioate
  modified_base 7: mod_base = OTHER; note = sugar modification: 2-fluororibose; note = thymine; note = backbone modification: 5'-phosphorothioate
  modified_base 8: mod_base = OTHER; note = sugar modification: 2-fluororibose; note = backbone modification: 5'-phosphorothioate
  modified_base 9: mod_base = OTHER; note = backbone modification: 5'-phosphorothioate; note = sugar modification: 2-fluororibose; note = thymine
  modified_base 10: mod_base = OTHER; note = backbone modification: 5'-phosphorothioate; note = sugar modification: 2-fluororibose
  modified_base 11: mod_base = OTHER; mod_base = m5c; note = sugar modification: 2-fluororibose; note = backbone modification: 5'-phosphorothioate
  modified_base 12: mod_base = OTHER; note = thymine; note = sugar modification: 2-fluororibose; note = backbone modification: 5'-phosphorothioate
  modified_base 13: mod_base = OTHER; note = thymine; note = backbone modification: 5'-phosphorothioate; note = sugar modification: 2-fluororibose
  modified_base 14: mod_base = OTHER; mod_base = m5c; note = backbone modification: 5'-phosphorothioate; note = sugar modification: 2'-O-methoxyethylribose
  modified_base 15: mod_base = OTHER; note = backbone modification: 5'-phosphorothioate; note = sugar modification: 2'-O-methoxyethylribose
  modified_base 16: mod_base = OTHER; note = backbone modification: 5'-phosphorothioate; note = thymine; note = sugar modification: 2'-O-methoxyethylribose
  modified_base 17: mod_base = OTHER; mod_base = m5c; note = sugar modification: lna; note = backbone modification: 5'-phosphorothioate
  modified_base 18: mod_base = m5c; mod_base = OTHER; note = sugar modification: lna
tgttcttgtacttcatcc

SEQ ID NO: 1212 - RNA, 18 nt, synthetic construct
  source 1..18: mol_type = other RNA; note = Antisense oligonucleotide
  modified_base 1: mod_base = OTHER; note = sugar modification: lna; note = backbone modification: 5'-phosphorothioate; note = thymine
  modified_base 2: mod_base = OTHER; note = sugar modification: lna; note = backbone modification: 5'-phosphorothioate
  modified_base 3: mod_base = OTHER; note = backbone modification: 5'-phosphorothioate; note = sugar modification: 2'-O-methoxyethylribose; note = thymine
  modified_base 4: mod_base = OTHER; note = thymine; note = sugar modification: 2'-O-methoxyethylribose; note = backbone modification: 5'-phosphorothioate
  modified_base 5: mod_base = m5c; mod_base = OTHER; note = sugar modification: 2-fluororibose; note = backbone modification: 5'-phosphorothioate
  modified_base 6: mod_base = OTHER; note = sugar modification: 2-fluororibose; note = backbone modification: 5'-phosphorothioate; note = thymine
  modified_base 7: mod_base = OTHER; note = backbone modification: 5'-phosphorothioate; note = thymine; note = sugar modification: 2-fluororibose
  modified_base 8: mod_base = OTHER; note = backbone modification: 5'-phosphorothioate; note = sugar modification: 2-fluororibose
  modified_base 9: mod_base = OTHER; note = sugar modification: 2-fluororibose; note = backbone modification: 5'-phosphorothioate; note = thymine
  modified_base 10: mod_base = OTHER; note = backbone modification: 5'-phosphorothioate; note = sugar modification: 2-fluororibose
  modified_base 11: mod_base = OTHER; mod_base = m5c; note = backbone modification: 5'-phosphorothioate; note = sugar modification: 2-fluororibose
  modified_base 12: mod_base = OTHER; note = thymine; note = sugar modification: 2-fluororibose; note = backbone modification: 5'-phosphorothioate
  modified_base 13: mod_base = OTHER; note = sugar modification: 2-fluororibose; note = backbone modification: 5'-phosphorothioate; note = thymine
  modified_base 14: mod_base = m5c; mod_base = OTHER; note = backbone modification: 5'-phosphorothioate; note = sugar modification: 2-fluororibose
  modified_base 15: mod_base = OTHER; note = backbone modification: 5'-phosphorothioate; note = sugar modification: 2'-O-methoxyethylribose
  modified_base 16: mod_base = OTHER; note = sugar modification: 2'-O-methoxyethylribose; note = backbone modification: 5'-phosphorothioate; note = thymine
  modified_base 17: mod_base = m5c; mod_base = OTHER; note = backbone modification: 5'-phosphorothioate; note = sugar modification: lna
  modified_base 18: mod_base = OTHER; mod_base = m5c; note = sugar modification: lna
tgttcttgtacttcatcc

SEQ ID NO: 1213 - RNA, 15 nt, synthetic construct
  source 1..15: mol_type = other RNA; note = Antisense oligonucleotide
  modified_base 1: mod_base = OTHER; note = sugar modification: lna; note = backbone modification: 5'-phosphorothioate
  modified_base 2: mod_base = OTHER; note = backbone modification: 5'-phosphorothioate; note = sugar modification: 2'-O-methoxyethylribose
  modified_base 3: mod_base = OTHER; note = backbone modification: 5'-phosphorothioate; note = sugar modification: 2'-O-methoxyethylribose; note = thymine
  modified_base 4: mod_base = OTHER; note = sugar modification: 2'-O-methoxyethylribose; note = backbone modification: 5'-phosphorothioate; note = thymine
  modified_base 5: mod_base = OTHER; mod_base = m5c; note = sugar modification: 2'-O-methoxyethylribose; note = backbone modification: 5'-phosphorothioate
  modified_base 6: mod_base = OTHER; note = thymine; note = backbone modification: 5'-phosphorothioate; note = sugar modification: 2'-O-methoxyethylribose
  modified_base 7: mod_base = OTHER; note = sugar modification: 2'-O-methoxyethylribose; note = backbone modification: 5'-phosphorothioate; note = thymine
  modified_base 8: mod_base = OTHER; note = sugar modification: 2'-O-methoxyethylribose; note = thymine; note = backbone modification: 5'-phosphorothioate
  modified_base 9: mod_base = OTHER; mod_base = m5c; note = backbone modification: 5'-phosphorothioate; note = sugar modification: 2'-O-methoxyethylribose
  modified_base 10: mod_base = OTHER; note = sugar modification: 2'-O-methoxyethylribose; note = backbone modification: 5'-phosphorothioate
  modified_base 11: mod_base = OTHER; note = backbone modification: 5'-phosphorothioate; note = sugar modification: 2'-O-methoxyethylribose
  modified_base 12: mod_base = OTHER; mod_base = m5c; note = backbone modification: 5'-phosphorothioate; note = sugar modification: 2'-O-methoxyethylribose
  modified_base 13: mod_base = OTHER; note = thymine; note = backbone modification: 5'-phosphorothioate; note = sugar modification: 2'-O-methoxyethylribose
  modified_base 14: mod_base = OTHER; note = backbone modification: 5'-phosphorothioate; note = sugar modification: 2'-O-methoxyethylribose
  modified_base 15: mod_base = OTHER; note = sugar modification: 2'-O-methoxyethylribose
aattctttcaactag

SEQ ID NO: 1214 - RNA, 15 nt, synthetic construct
  source 1..15: mol_type = other RNA; note = Antisense oligonucleotide
  modified_base 1: mod_base = OTHER; note = sugar modification: 2'-O-methoxyethylribose; note = backbone modification: 5'-phosphorothioate
  modified_base 2: mod_base = OTHER; note = backbone modification: 5'-phosphorothioate; note = sugar modification: 2'-O-methoxyethylribose
  modified_base 3: mod_base = OTHER; note = sugar modification: 2'-O-methoxyethylribose; note = backbone modification: 5'-phosphorothioate; note = thymine
  modified_base 4: mod_base = OTHER; note = backbone modification: 5'-phosphorothioate; note = sugar modification: 2'-O-methoxyethylribose; note = thymine
  modified_base 5: mod_base = OTHER; mod_base = m5c; note = sugar modification: 2'-O-methoxyethylribose; note = backbone modification: 5'-phosphorothioate
  modified_base 6: mod_base = OTHER; note = backbone modification: 5'-phosphorothioate; note = sugar modification: 2'-O-methoxyethylribose; note = thymine
  modified_base 7: mod_base = OTHER; note = thymine; note = sugar modification: 2'-O-methoxyethylribose; note = backbone modification: 5'-phosphorothioate
  modified_base 8: mod_base = OTHER; note = sugar modification: 2'-O-methoxyethylribose; note = thymine; note = backbone modification: 5'-phosphorothioate
  modified_base 9: mod_base = OTHER; mod_base = m5c; note = sugar modification: 2'-O-methoxyethylribose; note = backbone modification: 5'-phosphorothioate
  modified_base 10: mod_base = OTHER; note = backbone modification: 5'-phosphorothioate; note = sugar modification: 2'-O-methoxyethylribose
  modified_base 11: mod_base = OTHER; note = backbone modification: 5'-phosphorothioate; note = sugar modification: 2'-O-methoxyethylribose
  modified_base 12: mod_base = m5c; mod_base = OTHER; note = backbone modification: 5'-phosphorothioate; note = sugar modification: 2'-O-methoxyethylribose
  modified_base 13: mod_base = OTHER; note = thymine; note = backbone modification: 5'-phosphorothioate; note = sugar modification: 2'-O-methoxyethylribose
  modified_base 14: mod_base = OTHER; note = sugar modification: 2'-O-methoxyethylribose; note = backbone modification: 5'-phosphorothioate
  modified_base 15: mod_base = OTHER; note = sugar modification: lna
aattctttcaactag

SEQ ID NO: 1215 - RNA, 15 nt, synthetic construct
  source 1..15: mol_type = other RNA; note = Antisense oligonucleotide
  modified_base 1: mod_base = OTHER; note = sugar modification: lna; note = backbone modification: 5'-phosphorothioate
  modified_base 2: mod_base = OTHER; note = backbone modification: 5'-phosphorothioate; note = sugar modification: 2'-O-methoxyethylribose
  modified_base 3: mod_base = OTHER; note = thymine; note = backbone modification: 5'-phosphorothioate; note = sugar modification: 2'-O-methoxyethylribose
  modified_base 4: mod_base = OTHER; note = backbone modification: 5'-phosphorothioate; note = thymine; note = sugar modification: 2'-O-methoxyethylribose
  modified_base 5: mod_base = OTHER; mod_base = m5c; note = backbone modification: 5'-phosphorothioate; note = sugar modification: 2'-O-methoxyethylribose
  modified_base 6: mod_base = OTHER; note = thymine; note = backbone modification: 5'-phosphorothioate; note = sugar modification: 2'-O-methoxyethylribose
  modified_base 7: mod_base = OTHER; note = sugar modification: 2'-O-methoxyethylribose; note = backbone modification: 5'-phosphorothioate; note = thymine
  modified_base 8: mod_base = OTHER; note = backbone modification: 5'-phosphorothioate; note = sugar modification: 2'-O-methoxyethylribose; note = thymine
  modified_base 9: mod_base = m5c; mod_base = OTHER; note = sugar modification: 2'-O-methoxyethylribose; note = backbone modification: 5'-phosphorothioate
  modified_base 10: mod_base = OTHER; note = sugar modification: 2'-O-methoxyethylribose; note = backbone modification: 5'-phosphorothioate
  modified_base 11: mod_base = OTHER; note = backbone modification: 5'-phosphorothioate; note = sugar modification: 2'-O-methoxyethylribose
  modified_base 12: mod_base = OTHER; mod_base = m5c; note = sugar modification: 2'-O-methoxyethylribose; note = backbone modification: 5'-phosphorothioate
  modified_base 13: mod_base = OTHER; note = sugar modification: 2'-O-methoxyethylribose; note = backbone modification: 5'-phosphorothioate; note = thymine
  modified_base 14: mod_base = OTHER; note = backbone modification: 5'-phosphorothioate; note = sugar modification: 2'-O-methoxyethylribose
  modified_base 15: mod_base = OTHER; note = sugar modification: lna
aattctttcaactag

SEQ ID NO: 1216 - RNA, 15 nt, synthetic construct
  source 1..15: mol_type = other RNA; note = Antisense oligonucleotide
  modified_base 1: mod_base = OTHER; note = backbone modification: 5'-phosphorothioate; note = sugar modification: lna
  modified_base 2: mod_base = OTHER; note = backbone modification: 5'-phosphorothioate; note = sugar modification: lna
  modified_base 3: mod_base = OTHER; note = thymine; note = sugar modification: 2'-O-methoxyethylribose; note = backbone modification: 5'-phosphorothioate
  modified_base 4: mod_base = OTHER; note = thymine; note = backbone modification: 5'-phosphorothioate; note = sugar modification: 2'-O-methoxyethylribose
  modified_base 5: mod_base = OTHER; mod_base = m5c; note = backbone modification: 5'-phosphorothioate; note = sugar modification: 2'-O-methoxyethylribose
  modified_base 6: mod_base = OTHER; note = thymine; note = backbone modification: 5'-phosphorothioate; note = sugar modification: 2'-O-methoxyethylribose
  modified_base 7: mod_base = OTHER; note = sugar modification: 2'-O-methoxyethylribose; note = thymine; note = backbone modification: 5'-phosphorothioate
  modified_base 8: mod_base = OTHER; note = sugar modification: 2'-O-methoxyethylribose; note = thymine; note = backbone modification: 5'-phosphorothioate
  modified_base 9: mod_base = OTHER; mod_base = m5c; note = backbone modification: 5'-phosphorothioate; note = sugar modification: 2'-O-methoxyethylribose
  modified_base 10: mod_base = OTHER; note = sugar modification: 2'-O-methoxyethylribose; note = backbone modification: 5'-phosphorothioate
  modified_base 11: mod_base = OTHER; note = backbone modification: 5'-phosphorothioate; note = sugar modification: 2'-O-methoxyethylribose
  modified_base 12: mod_base = OTHER; mod_base = m5c; note = backbone modification: 5'-phosphorothioate; note = sugar modification: 2'-O-methoxyethylribose
  modified_base 13: mod_base = OTHER; note = thymine; note = sugar modification: 2'-O-methoxyethylribose; note = backbone modification: 5'-phosphorothioate
  modified_base 14: mod_base = OTHER; note = backbone modification: 5'-phosphorothioate; note = sugar modification: 2'-O-methoxyethylribose
  modified_base 15: mod_base = OTHER; note = sugar modification: lna
aattctttcaactag

SEQ ID NO: 1217 - RNA, 15 nt, synthetic construct
  source 1..15: mol_type = other RNA; note = Antisense oligonucleotide
  modified_base 1: mod_base = OTHER; note = backbone modification: 5'-phosphorothioate; note = sugar modification: lna
  modified_base 2: mod_base = OTHER; note = backbone modification: 5'-phosphorothioate; note = sugar modification: 2'-O-methoxyethylribose
  modified_base 3: mod_base = OTHER; note = thymine; note = backbone modification: 5'-phosphorothioate; note = sugar modification: 2'-O-methoxyethylribose
  modified_base 4: mod_base = OTHER; note = sugar modification: 2'-O-methoxyethylribose; note = backbone modification: 5'-phosphorothioate; note = thymine
  modified_base 5: mod_base = m5c; mod_base = OTHER; note = sugar modification: 2'-O-methoxyethylribose; note = backbone modification: 5'-phosphorothioate
  modified_base 6: mod_base = OTHER; note = thymine; note = sugar modification: 2'-O-methoxyethylribose; note = backbone modification: 5'-phosphorothioate
  modified_base 7: mod_base = OTHER; note = thymine; note = sugar modification: 2'-O-methoxyethylribose; note = backbone modification: 5'-phosphorothioate
  modified_base 8: mod_base = OTHER; note = sugar modification: 2'-O-methoxyethylribose; note = backbone modification: 5'-phosphorothioate; note = thymine
  modified_base 9: mod_base = m5c; mod_base = OTHER; note = backbone modification: 5'-phosphorothioate; note = sugar modification: 2'-O-methoxyethylribose
  modified_base 10: mod_base = OTHER; note = backbone modification: 5'-phosphorothioate; note = sugar modification: 2'-O-methoxyethylribose
  modified_base 11: mod_base = OTHER; note = backbone modification: 5'-phosphorothioate; note = sugar modification: 2'-O-methoxyethylribose
  modified_base 12: mod_base = OTHER; mod_base = m5c; note = sugar modification: 2'-O-methoxyethylribose; note = backbone modification: 5'-phosphorothioate
  modified_base 13: mod_base = OTHER; note = sugar modification: 2'-O-methoxyethylribose; note = backbone modification: 5'-phosphorothioate; note = thymine
  modified_base 14: mod_base = OTHER; note = sugar modification: lna; note = backbone modification: 5'-phosphorothioate
  modified_base 15: mod_base = OTHER; note = sugar modification: lna
aattctttcaactag

SEQ ID NO: 1218 - RNA, 15 nt, synthetic construct
  source 1..15: mol_type = other RNA; note = Antisense oligonucleotide
  modified_base 1: mod_base = OTHER; note = sugar modification: lna; note = backbone modification: 5'-phosphorothioate
  modified_base 2: mod_base = OTHER; note = sugar modification: lna; note = backbone modification: 5'-phosphorothioate
  modified_base 3: mod_base = OTHER; note = thymine; note = backbone modification: 5'-phosphorothioate; note = sugar modification: 2'-O-methoxyethylribose
  modified_base 4: mod_base = OTHER; note = thymine; note = sugar modification: 2'-O-methoxyethylribose; note = backbone modification: 5'-phosphorothioate
  modified_base 5: mod_base = m5c; mod_base = OTHER; note = sugar modification: 2'-O-methoxyethylribose; note = backbone modification: 5'-phosphorothioate
  modified_base 6: mod_base = OTHER; note = sugar modification: 2'-O-methoxyethylribose; note = thymine; note = backbone modification: 5'-phosphorothioate
  modified_base 7: mod_base = OTHER; note = backbone modification: 5'-phosphorothioate; note = sugar modification: 2'-O-methoxyethylribose; note = thymine
  modified_base 8: mod_base = OTHER; note = sugar modification: 2'-O-methoxyethylribose; note = backbone modification: 5'-phosphorothioate; note = thymine
  modified_base 9: mod_base = OTHER; mod_base = m5c; note = backbone modification: 5'-phosphorothioate; note = sugar modification: 2'-O-methoxyethylribose
  modified_base 10: mod_base = OTHER; note = backbone modification: 5'-phosphorothioate; note = sugar modification: 2'-O-methoxyethylribose
  modified_base 11: mod_base = OTHER; note = backbone modification: 5'-phosphorothioate; note = sugar modification: 2'-O-methoxyethylribose
  modified_base 12: mod_base = OTHER; mod_base = m5c; note = backbone modification: 5'-phosphorothioate; note = sugar modification: 2'-O-methoxyethylribose
  modified_base 13: mod_base = OTHER; note = thymine; note = backbone modification: 5'-phosphorothioate; note = sugar modification: 2'-O-methoxyethylribose
  modified_base 14: mod_base = OTHER; note = backbone modification: 5'-phosphorothioate; note = sugar modification: lna
  modified_base 15: mod_base = OTHER; note = sugar modification: lna
aattctttcaactag

SEQ ID NO: 1219 - RNA, 15 nt, synthetic construct
  source 1..15: mol_type = other RNA; note = Antisense oligonucleotide
  modified_base 1: mod_base = OTHER; note = sugar modification: 2'-O-methoxyethylribose; note = backbone modification: 5'-phosphorothioate
  modified_base 2: mod_base = OTHER; note = sugar modification: 2'-O-methoxyethylribose; note = backbone modification: 5'-phosphorothioate
  modified_base 3: mod_base = OTHER; note = backbone modification: 5'-phosphorothioate; note = sugar modification: 2'-O-methoxyethylribose; note = thymine
  modified_base 4: mod_base = OTHER; note = sugar modification: 2'-O-methoxyethylribose; note = backbone modification: 5'-phosphorothioate; note = thymine
  modified_base 5: mod_base = OTHER; mod_base = m5c; note = backbone modification: 5'-phosphorothioate; note = sugar modification: 2'-O-methoxyethylribose
  modified_base 6: mod_base = OTHER; note = sugar modification: 2'-O-methoxyethylribose; note = backbone modification: 5'-phosphorothioate; note = thymine
  modified_base 7: mod_base = OTHER; note = backbone modification: 5'-phosphorothioate; note = thymine; note = sugar modification: 2'-O-methoxyethylribose
  modified_base 8: mod_base = OTHER; note = sugar modification: 2'-O-methoxyethylribose; note = thymine; note = backbone modification: 5'-phosphorothioate
  modified_base 9: mod_base = m5c; mod_base = OTHER; note = sugar modification: 2'-O-methoxyethylribose; note = backbone modification: 5'-phosphorothioate
  modified_base 10: mod_base = OTHER; note = sugar modification: 2'-O-methoxyethylribose; note = backbone modification: 5'-phosphorothioate
  modified_base 11: mod_base = OTHER; note = backbone modification: 5'-phosphorothioate; note = sugar modification: 2'-O-methoxyethylribose
  modified_base 12: mod_base = m5c; mod_base = OTHER; note = sugar modification: 2'-O-methoxyethylribose; note = backbone modification: 5'-phosphorothioate
  modified_base 13: mod_base = OTHER; note = thymine; note = sugar modification: 2'-O-methoxyethylribose; note = backbone modification: 5'-phosphorothioate
  modified_base 14: mod_base = OTHER; note = backbone modification: 5'-phosphorothioate; note = sugar modification: lna
  modified_base 15: mod_base = OTHER; note = sugar modification: lna
aattctttcaactag

SEQ ID NO: 1220 - RNA, 20 nt, synthetic construct
  source 1..20: mol_type = other RNA; note = Antisense oligonucleotide
  modified_base 1: mod_base = OTHER; note = backbone modification: 5'-phosphorothioate; note = sugar modification: lna; note = thymine
  modified_base 2: mod_base = OTHER; note = backbone modification: 5'-phosphorothioate
  modified_base 3: mod_base = OTHER; note = backbone modification: 5'-phosphorothioate
  modified_base 4: mod_base = OTHER; note = backbone modification: 5'-phosphorothioate
  modified_base 5: mod_base = OTHER; note = backbone modification: 5'-phosphorothioate
  modified_base 6: mod_base = OTHER; note = backbone modification: 5'-phosphorothioate
  modified_base 7: mod_base = OTHER; note = backbone modification: 5'-phosphorothioate
  modified_base 8: mod_base = OTHER; note = backbone modification: 5'-phosphorothioate
  modified_base 9: mod_base = OTHER; note = backbone modification: 5'-phosphorothioate
  modified_base 10: mod_base = OTHER; note = backbone modification: 5'-phosphorothioate
  modified_base 11: mod_base = OTHER; note = backbone modification: 5'-phosphorothioate
  modified_base 12: mod_base = OTHER; note = backbone modification: 5'-phosphorothioate
  modified_base 13: mod_base = OTHER; mod_base = m5c; note = backbone modification: 5'-phosphorothioate; note = sugar modification: lna
  modified_base 14: mod_base = OTHER; note = backbone modification: 5'-phosphorothioate
  modified_base 15: mod_base = OTHER; note = backbone modification: 5'-phosphorothioate
  modified_base 16: mod_base = OTHER; note = backbone modification: 5'-phosphorothioate
  modified_base 17: mod_base = OTHER; note = backbone modification: 5'-phosphorothioate
  modified_base 18: mod_base = OTHER; note = backbone modification: 5'-phosphorothioate
  modified_base 19: mod_base = OTHER; note = backbone modification: 5'-phosphorothioate
  modified_base 20: mod_base = OTHER; note = sugar modification: lna
tctgaattctttcaactaga

SEQ ID NO: 1221 - RNA, 16 nt, synthetic construct
  source 1..16: mol_type = other RNA; note = Antisense oligonucleotide
  modified_base 1: mod_base = OTHER; note = backbone modification: 5'-phosphorothioate; note = thymine; note = sugar modification: 2'-O-methoxyethylribose
  modified_base 2: mod_base = OTHER; mod_base = m5c; note = sugar modification: 2'-O-methoxyethylribose; note = backbone modification: 5'-phosphorothioate
  modified_base 3: mod_base = OTHER; note = sugar modification: 2'-O-methoxyethylribose; note = backbone modification: 5'-phosphorothioate; note = thymine
  modified_base 4: mod_base = OTHER; note = sugar modification: 2'-O-methoxyethylribose; note = backbone modification: 5'-phosphorothioate
  modified_base 5: mod_base = OTHER; note = backbone modification: 5'-phosphorothioate; note = sugar modification: 2'-O-methoxyethylribose
  modified_base 6: mod_base = OTHER; note = backbone modification: 5'-phosphorothioate; note = sugar modification: 2'-O-methoxyethylribose
  modified_base 7: mod_base = OTHER; note = sugar modification: 2'-O-methoxyethylribose; note = backbone modification: 5'-phosphorothioate; note = thymine
  modified_base 8: mod_base = OTHER; note = sugar modification: 2'-O-methoxyethylribose; note = backbone modification: 5'-phosphorothioate; note = thymine
  modified_base 9: mod_base = m5c; mod_base = OTHER; note = backbone modification: 5'-phosphorothioate; note = sugar modification: 2'-O-methoxyethylribose
  modified_base 10: mod_base = OTHER; note = sugar modification: 2'-O-methoxyethylribose; note = thymine; note = backbone modification: 5'-phosphorothioate
  modified_base 11: mod_base = OTHER; note = backbone modification: 5'-phosphorothioate; note = sugar modification: 2'-O-methoxyethylribose; note = thymine
  modified_base 12: mod_base = OTHER; note = sugar modification: 2'-O-methoxyethylribose; note = thymine; note = backbone modification: 5'-phosphorothioate
  modified_base 13: mod_base = OTHER; mod_base = m5c; note = backbone modification: 5'-phosphorothioate; note = sugar modification: 2'-O-methoxyethylribose
  modified_base 14: mod_base = OTHER; note = sugar modification: 2'-O-methoxyethylribose; note = backbone modification: 5'-phosphorothioate
  modified_base 15: mod_base = OTHER; note = backbone modification: 5'-phosphorothioate; note = sugar modification: 2'-O-methoxyethylribose
  modified_base 16: mod_base = m5c; mod_base = OTHER; note = sugar modification: 2'-O-methoxyethylribose
tctgaattctttcaac

SEQ ID NO: 1222 - RNA, 16 nt, synthetic construct
  source 1..16: mol_type = other RNA; note = Antisense oligonucleotide
  modified_base 1: mod_base = m5c; mod_base = OTHER; note = sugar modification: 2'-O-methoxyethylribose; note = backbone modification: 5'-phosphorothioate
  modified_base 2: mod_base = OTHER; note = backbone modification: 5'-phosphorothioate; note = thymine; note = sugar modification: 2'-O-methoxyethylribose
  modified_base 3: mod_base = OTHER; note = backbone modification: 5'-phosphorothioate; note = sugar modification: 2'-O-methoxyethylribose
  modified_base 4: mod_base = OTHER; note = sugar modification: 2'-O-methoxyethylribose; note = backbone modification: 5'-phosphorothioate
  modified_base 5: mod_base = OTHER; note = backbone modification: 5'-phosphorothioate; note = sugar modification: 2'-O-methoxyethylribose
  modified_base 6: mod_base = OTHER; note = sugar modification: 2'-O-methoxyethylribose; note = backbone modification: 5'-phosphorothioate; note = thymine
  modified_base 7: mod_base = OTHER; note = backbone modification: 5'-phosphorothioate; note = sugar modification: 2'-O-methoxyethylribose; note = thymine
  modified_base 8: mod_base = OTHER; mod_base = m5c; note = sugar modification: 2'-O-methoxyethylribose; note = backbone modification: 5'-phosphorothioate
  modified_base 9: mod_base = OTHER; note = sugar modification: 2'-O-methoxyethylribose; note = backbone modification: 5'-phosphorothioate; note = thymine
  modified_base 10: mod_base = OTHER; note = thymine; note = sugar modification: 2'-O-methoxyethylribose; note = backbone modification: 5'-phosphorothioate
  modified_base 11: mod_base = OTHER; note = sugar modification: 2'-O-methoxyethylribose; note = thymine; note = backbone modification: 5'-phosphorothioate
  modified_base 12: mod_base = m5c; mod_base = OTHER; note = sugar modification: 2'-O-methoxyethylribose; note = backbone modification: 5'-phosphorothioate
  modified_base 13: mod_base = OTHER; note = backbone modification: 5'-phosphorothioate; note = sugar modification: 2'-O-methoxyethylribose
  modified_base 14: mod_base = OTHER; note = sugar modification: 2'-O-methoxyethylribose; note = backbone modification: 5'-phosphorothioate
  modified_base 15: mod_base = OTHER; mod_base = m5c; note = sugar modification: 2'-O-methoxyethylribose; note = backbone modification: 5'-phosphorothioate
  modified_base 16: mod_base = OTHER; note = thymine; note = sugar modification: 2'-O-methoxyethylribose
ctgaattctttcaact

SEQ ID NO: 1223 - RNA, 16 nt, synthetic construct
  source 1..16: mol_type = other RNA; note = Antisense oligonucleotide
  modified_base 1: mod_base = OTHER; note = backbone modification: 5'-phosphorothioate; note = thymine; note = sugar modification: 2'-O-methoxyethylribose
  modified_base 2: mod_base = OTHER; note = sugar modification: 2'-O-methoxyethylribose; note = backbone modification: 5'-phosphorothioate
  modified_base 3: mod_base = OTHER; note = sugar modification: 2'-O-methoxyethylribose; note = backbone modification: 5'-phosphorothioate
  modified_base 4: mod_base = OTHER; note = backbone modification: 5'-phosphorothioate; note = sugar modification: 2'-O-methoxyethylribose
  modified_base 5: mod_base = OTHER; note = thymine; note = sugar modification: 2'-O-methoxyethylribose; note = backbone modification: 5'-phosphorothioate
  modified_base 6: mod_base = OTHER; note = sugar modification: 2'-O-methoxyethylribose; note = thymine; note = backbone modification: 5'-phosphorothioate
  modified_base 7: mod_base = OTHER; mod_base = m5c; note = backbone modification: 5'-phosphorothioate; note = sugar modification: 2'-O-methoxyethylribose
  modified_base 8: mod_base = OTHER; note = backbone modification: 5'-phosphorothioate; note = thymine; note = sugar modification: 2'-O-methoxyethylribose
  modified_base 9: mod_base = OTHER; note = backbone modification: 5'-phosphorothioate; note = thymine; note = sugar modification: 2'-O-methoxyethylribose
  modified_base 10: mod_base = OTHER; note = sugar modification: 2'-O-methoxyethylribose; note = thymine; note = backbone modification: 5'-phosphorothioate
  modified_base 11: mod_base = OTHER; mod_base = m5c; note = sugar modification: 2'-O-methoxyethylribose; note = backbone modification: 5'-phosphorothioate
  modified_base 12: mod_base = OTHER; note = backbone modification: 5'-phosphorothioate; note = sugar modification: 2'-O-methoxyethylribose
  modified_base 13: mod_base = OTHER; note = sugar modification: 2'-O-methoxyethylribose; note = backbone modification: 5'-phosphorothioate
  modified_base 14: mod_base = OTHER; mod_base = m5c; note = backbone modification: 5'-phosphorothioate; note = sugar modification: 2'-O-methoxyethylribose
  modified_base 15: mod_base = OTHER; note = sugar modification: 2'-O-methoxyethylribose; note = thymine; note = backbone modification: 5'-phosphorothioate
  modified_base 16: mod_base = OTHER; note = sugar modification: 2'-O-methoxyethylribose
tgaattctttcaacta

SEQ ID NO: 1224 - RNA, 16 nt, synthetic construct
  source 1..16: mol_type = other RNA; note = Antisense oligonucleotide
  modified_base 1: mod_base = OTHER; note = sugar modification: 2'-O-methoxyethylribose; note = backbone modification: 5'-phosphorothioate
  modified_base 2: mod_base = OTHER; note = backbone modification: 5'-phosphorothioate; note = sugar modification: 2'-O-methoxyethylribose
  modified_base 3: mod_base = OTHER; note = sugar modification: 2'-O-methoxyethylribose; note = backbone modification: 5'-phosphorothioate
  modified_base 4: mod_base = OTHER; note = thymine; note = sugar modification: 2'-O-methoxyethylribose; note = backbone modification: 5'-phosphorothioate
  modified_base 5: mod_base = OTHER; note = sugar modification: 2'-O-methoxyethylribose; note = thymine; note = backbone modification: 5'-phosphorothioate
  modified_base 6: mod_base = OTHER; mod_base = m5c; note = backbone modification: 5'-phosphorothioate; note = sugar modification: 2'-O-methoxyethylribose
  modified_base 7: mod_base = OTHER; note = sugar modification: 2'-O-methoxyethylribose; note = backbone modification: 5'-phosphorothioate; note = thymine
  modified_base 8: mod_base = OTHER; note = sugar modification: 2'-O-methoxyethylribose; note = thymine; note = backbone modification: 5'-phosphorothioate
  modified_base 9: mod_base = OTHER; note = sugar modification: 2'-O-methoxyethylribose; note = backbone modification: 5'-phosphorothioate; note = thymine
  modified_base 10: mod_base = OTHER; mod_base = m5c; note = backbone modification: 5'-phosphorothioate; note = sugar modification: 2'-O-methoxyethylribose
  modified_base 11: mod_base = OTHER; note = backbone modification: 5'-phosphorothioate; note = sugar modification: 2'-O-methoxyethylribose
  modified_base 12: mod_base = OTHER; note = sugar modification: 2'-O-methoxyethylribose; note = backbone modification: 5'-phosphorothioate
  modified_base 13: mod_base = OTHER; mod_base = m5c; note = backbone modification: 5'-phosphorothioate; note = sugar modification: 2'-O-methoxyethylribose
  modified_base 14: mod_base = OTHER; note = backbone modification: 5'-phosphorothioate; note = sugar modification: 2'-O-methoxyethylribose; note = thymine
  modified_base 15: mod_base = OTHER; note = backbone modification: 5'-phosphorothioate; note = sugar modification: 2'-O-methoxyethylribose
  modified_base 16: mod_base = OTHER; note = sugar modification: 2'-O-methoxyethylribose
gaattctttcaactag

SEQ ID NO: 1225 - RNA, 16 nt, synthetic construct
  source 1..16: mol_type = other RNA; note = Antisense oligonucleotide
  modified_base 1: mod_base = OTHER; note = sugar modification: 2'-O-methoxyethylribose; note = backbone modification: 5'-phosphorothioate
  modified_base 2: mod_base = OTHER; note = sugar modification: 2'-O-methoxyethylribose; note = backbone modification: 5'-phosphorothioate
  modified_base 3: mod_base = OTHER; note = thymine; note = backbone modification: 5'-phosphorothioate; note = sugar modification: 2'-O-methoxyethylribose
  modified_base 4: mod_base = OTHER; note = backbone modification: 5'-phosphorothioate; note = thymine; note = sugar modification: 2'-O-methoxyethylribose
  modified_base 5: mod_base = OTHER; mod_base = m5c; note = sugar modification: 2'-O-methoxyethylribose; note = backbone modification: 5'-phosphorothioate
  modified_base 6: mod_base = OTHER; note = sugar modification: 2'-O-methoxyethylribose; note = backbone modification: 5'-phosphorothioate; note = thymine
  modified_base 7: mod_base = OTHER; note = sugar modification: 2'-O-methoxyethylribose; note = thymine; note = backbone modification: 5'-phosphorothioate
  modified_base 8: mod_base = OTHER; note = backbone modification: 5'-phosphorothioate; note = thymine; note = sugar modification: 2'-O-methoxyethylribose
  modified_base 9: mod_base = m5c; mod_base = OTHER; note = backbone modification: 5'-phosphorothioate; note = sugar modification: 2'-O-methoxyethylribose
  modified_base 10: mod_base = OTHER; note = backbone modification: 5'-phosphorothioate; note = sugar modification: 2'-O-methoxyethylribose
  modified_base 11: mod_base = OTHER; note = sugar modification: 2'-O-methoxyethylribose; note = backbone modification: 5'-phosphorothioate
  modified_base 12: mod_base = OTHER; mod_base = m5c; note = backbone modification: 5'-phosphorothioate; note = sugar modification: 2'-O-methoxyethylribose
  modified_base 13: mod_base = OTHER; note = thymine; note = sugar modification: 2'-O-methoxyethylribose; note = backbone modification: 5'-phosphorothioate
  modified_base 14: mod_base = OTHER; note = sugar modification: 2'-O-methoxyethylribose; note = backbone modification: 5'-phosphorothioate
  modified_base 15: mod_base = OTHER; note = sugar modification: 2'-O-methoxyethylribose; note = backbone modification: 5'-phosphorothioate
  modified_base 16: mod_base = OTHER; note = sugar modification: 2'-O-methoxyethylribose
aattctttcaactaga

SEQ ID NO: 1226 - RNA, 16 nt, synthetic construct
  source 1..16: mol_type = other RNA; note = Antisense oligonucleotide
  modified_base 1: mod_base = m5c; mod_base = OTHER; note = backbone modification: 5'-phosphorothioate; note = sugar modification: lna
  modified_base 2: mod_base = OTHER; note = sugar modification: 2'-O-methoxyethylribose; note = thymine; note = backbone modification: 5'-phosphorothioate
  modified_base 3: mod_base = OTHER; note = sugar modification: 2'-O-methoxyethylribose; note = backbone modification: 5'-phosphorothioate
  modified_base 4: mod_base = OTHER; note = backbone modification: 5'-phosphorothioate; note = sugar modification: 2'-O-methoxyethylribose
  modified_base 5: mod_base = OTHER; note = backbone modification: 5'-phosphorothioate; note = sugar modification: 2'-O-methoxyethylribose
  modified_base 6: mod_base = OTHER; note = backbone modification: 5'-phosphorothioate; note = sugar modification: 2'-O-methoxyethylribose; note = thymine
  modified_base 7: mod_base = OTHER; note = backbone modification: 5'-phosphorothioate; note = thymine; note = sugar modification: 2'-O-methoxyethylribose
  modified_base 8: mod_base = OTHER; mod_base = m5c; note = backbone modification: 5'-phosphorothioate; note = sugar modification: 2'-O-methoxyethylribose
  modified_base 9: mod_base = OTHER; note = thymine; note = sugar modification: 2'-O-methoxyethylribose; note = backbone modification: 5'-phosphorothioate
  modified_base 10: mod_base = OTHER; note = thymine; note = sugar modification: 2'-O-methoxyethylribose; note = backbone modification: 5'-phosphorothioate
  modified_base 11: mod_base = OTHER; note = thymine; note = backbone modification: 5'-phosphorothioate; note = sugar modification: 2'-O-methoxyethylribose
  modified_base 12: mod_base = OTHER; mod_base = m5c; note = backbone modification: 5'-phosphorothioate; note = sugar modification: 2'-O-methoxyethylribose
  modified_base 13: mod_base = OTHER; note = sugar modification: 2'-O-methoxyethylribose; note = backbone modification: 5'-phosphorothioate
  modified_base 14: mod_base = OTHER; note = backbone modification: 5'-phosphorothioate; note = sugar modification: 2'-O-methoxyethylribose
  modified_base 15: mod_base = m5c; mod_base = OTHER; note = backbone modification: 5'-phosphorothioate; note = sugar modification: 2'-O-methoxyethylribose
  modified_base 16: mod_base = OTHER; note = thymine; note = sugar modification: lna
ctgaattctttcaact

SEQ ID NO: 1227 - RNA, 16 nt, synthetic construct
  source 1..16: mol_type = other RNA; note = Antisense oligonucleotide
  modified_base 1: mod_base = OTHER; note = thymine; note = backbone modification: 5'-phosphorothioate; note = sugar modification: lna
  modified_base 2: mod_base = OTHER; note = backbone modification: 5'-phosphorothioate; note = sugar modification: 2'-O-methoxyethylribose
  modified_base 3: mod_base = OTHER; note = backbone modification: 5'-phosphorothioate; note = sugar modification: 2'-O-methoxyethylribose
  modified_base 4: mod_base = OTHER; note = backbone modification: 5'-phosphorothioate; note = sugar modification: 2'-O-methoxyethylribose
  modified_base 5: mod_base = OTHER; note = thymine; note = sugar modification: 2'-O-methoxyethylribose; note = backbone modification: 5'-phosphorothioate
  modified_base 6: mod_base = OTHER; note = backbone modification: 5'-phosphorothioate; note = sugar modification: 2'-O-methoxyethylribose; note = thymine
  modified_base 7: mod_base = OTHER; mod_base = m5c; note = backbone modification: 5'-phosphorothioate; note = sugar modification: 2'-O-methoxyethylribose
  modified_base 8: mod_base = OTHER; note = thymine; note = backbone modification: 5'-phosphorothioate; note = sugar modification: 2'-O-methoxyethylribose
  modified_base 9: mod_base = OTHER; note = backbone modification: 5'-phosphorothioate; note = thymine; note = sugar modification: 2'-O-methoxyethylribose
  modified_base 10: mod_base = OTHER; note = sugar modification: 2'-O-methoxyethylribose; note = backbone modification: 5'-phosphorothioate; note = thymine
  modified_base 11: mod_base = m5c; mod_base = OTHER; note = sugar modification: 2'-O-methoxyethylribose; note = backbone modification: 5'-phosphorothioate
  modified_base 12: mod_base = OTHER; note = backbone modification: 5'-phosphorothioate; note = sugar modification: 2'-O-methoxyethylribose
  modified_base 13: mod_base = OTHER; note = sugar modification: 2'-O-methoxyethylribose; note = backbone modification: 5'-phosphorothioate
  modified_base 14: mod_base = OTHER; mod_base = m5c; note = backbone modification: 5'-phosphorothioate; note = sugar modification: 2'-O-methoxyethylribose
  modified_base 15: mod_base = OTHER; note = sugar modification: 2'-O-methoxyethylribose; note = thymine; note = backbone modification: 5'-phosphorothioate
  modified_base 16: mod_base = OTHER; note = sugar modification: lna
tgaattctttcaacta

SEQ ID NO: 1228 - RNA, 16 nt, synthetic construct
  source 1..16: mol_type = other RNA; note = Antisense oligonucleotide
  modified_base 1: mod_base = OTHER; note = sugar modification: lna; note = backbone modification: 5'-phosphorothioate
  modified_base 2: mod_base = OTHER; note = sugar modification: 2'-O-methoxyethylribose; note = backbone modification: 5'-phosphorothioate
  modified_base 3: mod_base = OTHER; note = sugar modification: 2'-O-methoxyethylribose; note = backbone modification: 5'-phosphorothioate
  modified_base 4: mod_base = OTHER; note = sugar modification: 2'-O-methoxyethylribose; note = thymine; note = backbone modification: 5'-phosphorothioate
  modified_base 5: mod_base = OTHER; note = backbone modification: 5'-phosphorothioate; note = sugar modification: 2'-O-methoxyethylribose; note = thymine
  modified_base 6: mod_base = OTHER; mod_base = m5c; note = backbone modification: 5'-phosphorothioate; note = sugar modification: 2'-O-methoxyethylribose
  modified_base 7: mod_base = OTHER; note = backbone modification: 5'-phosphorothioate; note = thymine; note = sugar modification: 2'-O-methoxyethylribose
  modified_base 8: mod_base = OTHER; note = sugar modification: 2'-O-methoxyethylribose; note = thymine; note = backbone modification: 5'-phosphorothioate
  modified_base 9: mod_base = OTHER; note = backbone modification: 5'-phosphorothioate; note = sugar modification: 2'-O-methoxyethylribose; note = thymine
  modified_base 10: mod_base = OTHER; mod_base = m5c; note = backbone modification: 5'-phosphorothioate; note = sugar modification: 2'-O-methoxyethylribose
  modified_base 11: mod_base = OTHER; note = sugar modification: 2'-O-methoxyethylribose; note = backbone modification: 5'-phosphorothioate
  modified_base 12: mod_base = OTHER; note = sugar modification: 2'-O-methoxyethylribose; note = backbone modification: 5'-phosphorothioate
  modified_base 13: mod_base = m5c; mod_base = OTHER; note = backbone modification: 5'-phosphorothioate; note = sugar modification: 2'-O-methoxyethylribose
  modified_base 14: mod_base = OTHER; note = thymine; note = backbone modification: 5'-phosphorothioate; note = sugar modification: 2'-O-methoxyethylribose
  modified_base 15: mod_base = OTHER; note = sugar modification: 2'-O-methoxyethylribose; note = backbone modification: 5'-phosphorothioate
  modified_base 16: mod_base = OTHER; note = sugar modification: lna
gaattctttcaactag

SEQ ID NO: 1229 - RNA, 16 nt, synthetic construct
  source 1..16: mol_type = other RNA; note = Antisense oligonucleotide
  modified_base 1: mod_base = OTHER; note = backbone modification: 5'-phosphorothioate; note = sugar modification: lna
  modified_base 2: mod_base = OTHER; note = sugar modification: 2'-O-methoxyethylribose; note = backbone modification: 5'-phosphorothioate
  modified_base 3: mod_base = OTHER; note = sugar modification: 2'-O-methoxyethylribose; note = thymine; note = backbone modification: 5'-phosphorothioate
  modified_base 4: mod_base = OTHER; note = sugar modification: 2'-O-methoxyethylribose; note = backbone modification: 5'-phosphorothioate; note = thymine
  modified_base 5: mod_base = m5c; mod_base = OTHER; note = backbone modification: 5'-phosphorothioate; note = sugar modification: 2'-O-methoxyethylribose
  modified_base 6: mod_base = OTHER; note = sugar modification: 2'-O-methoxyethylribose; note = thymine; note = backbone modification: 5'-phosphorothioate
  modified_base 7: mod_base = OTHER; note = sugar modification: 2'-O-methoxyethylribose; note = backbone modification: 5'-phosphorothioate; note = thymine
  modified_base 8: mod_base = OTHER; note = sugar modification: 2'-O-methoxyethylribose; note = backbone modification: 5'-phosphorothioate; note = thymine
  modified_base 9: mod_base = OTHER; mod_base = m5c; note = backbone modification: 5'-phosphorothioate; note = sugar modification: 2'-O-methoxyethylribose
  modified_base 10: mod_base = OTHER; note = sugar modification: 2'-O-methoxyethylribose; note = backbone modification: 5'-phosphorothioate
  modified_base 11: mod_base = OTHER; note = sugar modification: 2'-O-methoxyethylribose; note = backbone modification: 5'-phosphorothioate
  modified_base 12: mod_base = OTHER; mod_base = m5c; note = sugar modification: 2'-O-methoxyethylribose; note = backbone modification: 5'-phosphorothioate
  modified_base 13: mod_base = OTHER; note = backbone modification: 5'-phosphorothioate; note = thymine; note = sugar modification: 2'-O-methoxyethylribose
  modified_base 14: mod_base = OTHER; note = sugar modification: 2'-O-methoxyethylribose; note = backbone modification: 5'-phosphorothioate
  modified_base 15: mod_base = OTHER; note = sugar modification: 2'-O-methoxyethylribose; note = backbone modification: 5'-phosphorothioate
  modified_base 16: mod_base = OTHER; note = sugar modification: lna
aattctttcaactaga

SEQ ID NO: 1230 - RNA, 18 nt, synthetic construct
  source 1..18: mol_type = other RNA; note = Antisense oligonucleotide
  modified_base 1: mod_base = OTHER; note = backbone modification: 5'-phosphorothioate
  modified_base 2: mod_base = OTHER; note = backbone modification: 5'-phosphorothioate
  modified_base 3: mod_base = OTHER; note = backbone modification: 5'-phosphorothioate
  modified_base 4: mod_base = OTHER; note = backbone modification: 5'-phosphorothioate
  modified_base 5: mod_base = OTHER; note = backbone modification: 5'-phosphorothioate
  modified_base 6: mod_base = OTHER; note = backbone modification: 5'-phosphorothioate
  modified_base 7: mod_base = OTHER; note = backbone modification: 5'-phosphorothioate
  modified_base 8: mod_base = OTHER; note = backbone modification: 5'-phosphorothioate
  modified_base 9: mod_base = OTHER; note = backbone modification: 5'-phosphorothioate
  modified_base 10: mod_base = OTHER; note = backbone modification: 5'-phosphorothioate
  modified_base 11: mod_base = OTHER; note = backbone modification: 5'-phosphorothioate
  modified_base 12: mod_base = OTHER; note = backbone modification: 5'-phosphorothioate
  modified_base 13: mod_base = OTHER; note = backbone modification: 5'-phosphorothioate
  modified_base 14: mod_base = OTHER; note = backbone modification: 5'-phosphorothioate
  modified_base 15: mod_base = OTHER; note = backbone modification: 5'-phosphorothioate
  modified_base 16: mod_base = OTHER; note = backbone modification: 5'-phosphorothioate
  modified_base 17: mod_base = OTHER; note = backbone modification: 5'-phosphorothioate
ctgaattctttcaactag

SEQ ID NO: 1231 - RNA, 18 nt, synthetic construct
  source 1..18: mol_type = other RNA; note = Antisense oligonucleotide
  modified_base 1: mod_base = m5c; mod_base = OTHER; note = sugar modification: lna; note = backbone modification: 5'-phosphorothioate
  modified_base 2: mod_base = OTHER; note = backbone modification: 5'-phosphorothioate
  modified_base 3: mod_base = OTHER; note = backbone modification: 5'-phosphorothioate
  modified_base 4: mod_base = OTHER; note = backbone modification: 5'-phosphorothioate
  modified_base 5: mod_base = OTHER; note = backbone modification: 5'-phosphorothioate
  modified_base 6: mod_base = OTHER; note = backbone modification: 5'-phosphorothioate
  modified_base 7: mod_base = OTHER; note = backbone modification: 5'-phosphorothioate
  modified_base 8: mod_base = OTHER; note = backbone modification: 5'-phosphorothioate
  modified_base 9: mod_base = OTHER; note = backbone modification: 5'-phosphorothioate
  modified_base 10: mod_base = OTHER; note = backbone modification: 5'-phosphorothioate
  modified_base 11: mod_base = OTHER; note = backbone modification: 5'-phosphorothioate
  modified_base 12: mod_base = OTHER; note = backbone modification: 5'-phosphorothioate
  modified_base 13: mod_base = OTHER; note = backbone modification: 5'-phosphorothioate
  modified_base 14: mod_base = OTHER; note = backbone modification: 5'-phosphorothioate
  modified_base 15: mod_base = OTHER; note = backbone modification: 5'-phosphorothioate
  modified_base 16: mod_base = OTHER; note = backbone modification: 5'-phosphorothioate
  modified_base 17: mod_base = OTHER; note = backbone modification: 5'-phosphorothioate
ctgaattctttcaactag

SEQ ID NO: 1232 - RNA, 18 nt, synthetic construct
  source 1..18: mol_type = other RNA; note = Antisense oligonucleotide
  modified_base 1: mod_base = OTHER; note = backbone modification: 5'-phosphorothioate
  modified_base 2: mod_base = OTHER; note = backbone modification: 5'-phosphorothioate
  modified_base 3: mod_base = OTHER; note = backbone modification: 5'-phosphorothioate
  modified_base 4: mod_base = OTHER; note = backbone modification: 5'-phosphorothioate
  modified_base 5: mod_base = OTHER; note = backbone modification: 5'-phosphorothioate
  modified_base 6: mod_base = OTHER; note = backbone modification: 5'-phosphorothioate
  modified_base 7: mod_base = OTHER; note = backbone modification: 5'-phosphorothioate
  modified_base 8: mod_base = OTHER; note = backbone modification: 5'-phosphorothioate
  modified_base 9: mod_base = OTHER; note = backbone modification: 5'-phosphorothioate
  modified_base 10: mod_base = OTHER; note = backbone modification: 5'-phosphorothioate
  modified_base 11: mod_base = OTHER; note = backbone modification: 5'-phosphorothioate
  modified_base 12: mod_base = OTHER; note = backbone modification: 5'-phosphorothioate
  modified_base 13: mod_base = OTHER; note = backbone modification: 5'-phosphorothioate
  modified_base 14: mod_base = OTHER; note = backbone modification: 5'-phosphorothioate
  modified_base 15: mod_base = OTHER; note = backbone modification: 5'-phosphorothioate
  modified_base 16: mod_base = OTHER; note = backbone modification: 5'-phosphorothioate
  modified_base 17: mod_base = OTHER; note = backbone modification: 5'-phosphorothioate
  modified_base 18: mod_base = OTHER; note = sugar modification: lna
ctgaattctttcaactag

SEQ ID NO: 1233 - RNA, 18 nt, synthetic construct
  source 1..18: mol_type = other RNA; note = Antisense oligonucleotide
  modified_base 1: mod_base = OTHER; mod_base = m5c; note = sugar modification: lna; note = backbone modification: 5'-phosphorothioate
  modified_base 2: mod_base = OTHER; note = backbone modification: 5'-phosphorothioate
  modified_base 3: mod_base = OTHER; note = backbone modification: 5'-phosphorothioate
  modified_base 4: mod_base = OTHER; note = backbone modification: 5'-phosphorothioate
  modified_base 5: mod_base = OTHER; note = backbone modification: 5'-phosphorothioate
  modified_base 6: mod_base = OTHER; note = backbone modification: 5'-phosphorothioate
  modified_base 7: mod_base = OTHER; note = backbone modification: 5'-phosphorothioate
  modified_base 8: mod_base = OTHER; note = backbone modification: 5'-phosphorothioate
  modified_base 9: mod_base = OTHER; note = backbone modification: 5'-phosphorothioate
  modified_base 10: mod_base = OTHER; note = backbone modification: 5'-phosphorothioate
  modified_base 11: mod_base = OTHER; note = backbone modification: 5'-phosphorothioate
  modified_base 12: mod_base = OTHER; note = backbone modification: 5'-phosphorothioate
  modified_base 13: mod_base = OTHER; note = backbone modification: 5'-phosphorothioate
  modified_base 14: mod_base = OTHER; note = backbone modification: 5'-phosphorothioate
  modified_base 15: mod_base = OTHER; note = backbone modification: 5'-phosphorothioate
  modified_base 16: mod_base = OTHER; note = backbone modification: 5'-phosphorothioate
  modified_base 17: mod_base = OTHER; note = backbone modification: 5'-phosphorothioate
  modified_base 18: mod_base = OTHER; note = sugar modification: lna
ctgaattctttcaactag

SEQ ID NO: 1234 - RNA, 18 nt, synthetic construct
  source 1..18: mol_type = other RNA; note = Antisense oligonucleotide
  modified_base 1: mod_base = OTHER; mod_base = m5c; note = sugar modification: lna; note = backbone modification: 5'-phosphorothioate
  modified_base 2: mod_base = OTHER; note = backbone modification: 5'-phosphorothioate; note = sugar modification: lna; note = thymine
  modified_base 3: mod_base = OTHER; note = backbone modification: 5'-phosphorothioate
  modified_base 4: mod_base = OTHER; note = backbone modification: 5'-phosphorothioate
  modified_base 5: mod_base = OTHER; note = backbone modification: 5'-phosphorothioate
  modified_base 6: mod_base = OTHER; note = backbone modification: 5'-phosphorothioate
  modified_base 7: mod_base = OTHER; note = backbone modification: 5'-phosphorothioate
  modified_base 8: mod_base = OTHER; note = backbone modification: 5'-phosphorothioate
  modified_base 9: mod_base = OTHER; note = backbone modification: 5'-phosphorothioate
  modified_base 10: mod_base = OTHER; note = backbone modification: 5'-phosphorothioate
  modified_base 11: mod_base = OTHER; note = backbone modification: 5'-phosphorothioate
  modified_base 12: mod_base = OTHER; note = backbone modification: 5'-phosphorothioate
  modified_base 13: mod_base = OTHER; note = backbone modification: 5'-phosphorothioate
  modified_base 14: mod_base = OTHER; note = backbone modification: 5'-phosphorothioate
  modified_base 15: mod_base = OTHER; note = backbone modification: 5'-phosphorothioate
  modified_base 16: mod_base = OTHER; note = backbone modification: 5'-phosphorothioate
  modified_base 17: mod_base = OTHER; note = backbone modification: 5'-phosphorothioate; note = sugar modification: lna
  modified_base 18: mod_base = OTHER; note = sugar modification: lna
ctgaattctttcaactag

SEQ ID NO: 1235 - RNA, 20 nt, synthetic construct
  source 1..20: mol_type = other RNA; note = Antisense oligonucleotide
  modified_base 1: mod_base = OTHER; note = backbone modification: 5'-phosphorothioate
  modified_base 2: mod_base = OTHER; note = backbone modification: 5'-phosphorothioate
  modified_base 3: mod_base = OTHER; note = backbone modification: 5'-phosphorothioate
  modified_base 4: mod_base = OTHER; note = backbone modification: 5'-phosphorothioate
  modified_base 5: mod_base = OTHER; note = backbone modification: 5'-phosphorothioate
  modified_base 6: mod_base = OTHER; note = backbone modification: 5'-phosphorothioate
  modified_base 7: mod_base = OTHER; note = backbone modification: 5'-phosphorothioate
  modified_base 8: mod_base = OTHER; note = backbone modification: 5'-phosphorothioate
  modified_base 9: mod_base = OTHER; note = backbone modification: 5'-phosphorothioate
  modified_base 10: mod_base = OTHER; note = backbone modification: 5'-phosphorothioate
  modified_base 11: mod_base = OTHER; note = backbone modification: 5'-phosphorothioate
  modified_base 12: mod_base = OTHER; note = backbone modification: 5'-phosphorothioate
  modified_base 13: mod_base = OTHER; note = backbone modification: 5'-phosphorothioate
  modified_base 14: mod_base = OTHER; note = backbone modification: 5'-phosphorothioate
  modified_base 15: mod_base = OTHER; note = backbone modification: 5'-phosphorothioate
  modified_base 16: mod_base = OTHER; note = backbone modification: 5'-phosphorothioate
  modified_base 17: mod_base = OTHER; note = backbone modification: 5'-phosphorothioate
  modified_base 18: mod_base = OTHER; note = backbone modification: 5'-phosphorothioate
  modified_base 19: mod_base = OTHER; note = backbone modification: 5'-phosphorothioate
tctgaattctttcaactaga

SEQ ID NO: 1236 - RNA, 20 nt, synthetic construct
  source 1..20: mol_type = other RNA; note = Antisense oligonucleotide
  modified_base 1: mod_base = OTHER; note = sugar modification: lna; note = backbone modification: 5'-phosphorothioate; note = thymine
  modified_base 2: mod_base = OTHER; note = backbone modification: 5'-phosphorothioate
  modified_base 3: mod_base = OTHER; note = backbone modification: 5'-phosphorothioate
  modified_base 4: mod_base = OTHER; note = backbone modification: 5'-phosphorothioate
  modified_base 5: mod_base = OTHER; note = backbone modification: 5'-phosphorothioate
  modified_base 6: mod_base = OTHER; note = backbone modification: 5'-phosphorothioate
  modified_base 7: mod_base = OTHER; note = backbone modification: 5'-phosphorothioate
  modified_base 8: mod_base = OTHER; note = backbone modification: 5'-phosphorothioate
  modified_base 9: mod_base = OTHER; note = backbone modification: 5'-phosphorothioate
  modified_base 10: mod_base = OTHER; note = backbone modification: 5'-phosphorothioate
  modified_base 11: mod_base = OTHER; note = backbone modification: 5'-phosphorothioate
  modified_base 12: mod_base = OTHER; note = backbone modification: 5'-phosphorothioate
  modified_base 13: mod_base = OTHER; note = backbone modification: 5'-phosphorothioate
  modified_base 14: mod_base = OTHER; note = backbone modification: 5'-phosphorothioate
  modified_base 15: mod_base = OTHER; note = backbone modification: 5'-phosphorothioate
  modified_base 16: mod_base = OTHER; note = backbone modification: 5'-phosphorothioate
  modified_base 17: mod_base = OTHER; note = backbone modification: 5'-phosphorothioate
  modified_base 18: mod_base = OTHER; note = backbone modification: 5'-phosphorothioate
  modified_base 19: mod_base = OTHER; note = backbone modification: 5'-phosphorothioate
tctgaattctttcaactaga

SEQ ID NO: 1237 - RNA, 20 nt, synthetic construct
  source 1..20: mol_type = other RNA; note = Antisense oligonucleotide
  modified_base 1: mod_base = OTHER; note = backbone modification: 5'-phosphorothioate
  modified_base 2: mod_base = OTHER; note = backbone modification: 5'-phosphorothioate
  modified_base 3: mod_base = OTHER; note = backbone modification: 5'-phosphorothioate
  modified_base 4: mod_base = OTHER; note = backbone modification: 5'-phosphorothioate
  modified_base 5: mod_base = OTHER; note = backbone modification: 5'-phosphorothioate
  modified_base 6: mod_base = OTHER; note = backbone modification: 5'-phosphorothioate
  modified_base 7: mod_base = OTHER; note = backbone modification: 5'-phosphorothioate
  modified_base 8: mod_base = OTHER; note = backbone modification: 5'-phosphorothioate
  modified_base 9: mod_base = OTHER; note = backbone modification: 5'-phosphorothioate
  modified_base 10: mod_base = OTHER; note = backbone modification: 5'-phosphorothioate
  modified_base 11: mod_base = OTHER; note = backbone modification: 5'-phosphorothioate
  modified_base 12: mod_base = OTHER; note = backbone modification: 5'-phosphorothioate
  modified_base 13: mod_base = OTHER; note = backbone modification: 5'-phosphorothioate
  modified_base 14: mod_base = OTHER; note = backbone modification: 5'-phosphorothioate
  modified_base 15: mod_base = OTHER; note = backbone modification: 5'-phosphorothioate
  modified_base 16: mod_base = OTHER; note = backbone modification: 5'-phosphorothioate
  modified_base 17: mod_base = OTHER; note = backbone modification: 5'-phosphorothioate
  modified_base 18: mod_base = OTHER; note = backbone modification: 5'-phosphorothioate
  modified_base 19: mod_base = OTHER; note = backbone modification: 5'-phosphorothioate
  modified_base 20: mod_base = OTHER; note = sugar modification: lna
tctgaattctttcaactaga

SEQ ID NO: 1238 - RNA, 20 nt, synthetic construct
  source 1..20: mol_type = other RNA; note = Antisense oligonucleotide
  modified_base 1: mod_base = OTHER; note = backbone modification: 5'-phosphorothioate; note = thymine; note = sugar modification: lna
  modified_base 2: mod_base = OTHER; note = backbone modification: 5'-phosphorothioate
  modified_base 3: mod_base = OTHER; note = backbone modification: 5'-phosphorothioate
  modified_base 4: mod_base = OTHER; note = backbone modification: 5'-phosphorothioate
  modified_base 5: mod_base = OTHER; note = backbone modification: 5'-phosphorothioate
  modified_base 6: mod_base = OTHER; note = backbone modification: 5'-phosphorothioate
  modified_base 7: mod_base = OTHER; note = backbone modification: 5'-phosphorothioate
  modified_base 8: mod_base = OTHER; note = backbone modification: 5'-phosphorothioate
  modified_base 9: mod_base = OTHER; note = backbone modification: 5'-phosphorothioate
  modified_base 10: mod_base = OTHER; note = backbone modification: 5'-phosphorothioate
  modified_base 11: mod_base = OTHER; note = backbone modification: 5'-phosphorothioate
  modified_base 12: mod_base = OTHER; note = backbone modification: 5'-phosphorothioate
  modified_base 13: mod_base = OTHER; note = backbone modification: 5'-phosphorothioate
  modified_base 14: mod_base = OTHER; note = backbone modification: 5'-phosphorothioate
  modified_base 15: mod_base = OTHER; note = backbone modification: 5'-phosphorothioate
  modified_base 16: mod_base = OTHER; note = backbone modification: 5'-phosphorothioate
  modified_base 17: mod_base = OTHER; note = backbone modification: 5'-phosphorothioate
  modified_base 18: mod_base = OTHER; note = backbone modification: 5'-phosphorothioate
  modified_base 19: mod_base = OTHER; note = backbone modification: 5'-phosphorothioate
  modified_base 20: mod_base = OTHER; note = sugar modification: lna
tctgaattctttcaactaga

SEQ ID NO: 1239 - RNA, 20 nt, synthetic construct
  source 1..20: mol_type = other RNA; note = Antisense oligonucleotide
  modified_base 1: mod_base = OTHER; note = backbone modification: 5'-phosphorothioate; note = sugar modification: lna; note = thymine
  modified_base 2: mod_base = m5c; mod_base = OTHER; note = sugar modification: lna; note = backbone modification: 5'-phosphorothioate
  modified_base 3: mod_base = OTHER; note = backbone modification: 5'-phosphorothioate
  modified_base 4: mod_base = OTHER; note = backbone modification: 5'-phosphorothioate
  modified_base 5: mod_base = OTHER; note = backbone modification: 5'-phosphorothioate
  modified_base 6: mod_base = OTHER; note = backbone modification: 5'-phosphorothioate
  modified_base 7: mod_base = OTHER; note = backbone modification: 5'-phosphorothioate
  modified_base 8: mod_base = OTHER; note = backbone modification: 5'-phosphorothioate
  modified_base 9: mod_base = OTHER; note = backbone modification: 5'-phosphorothioate
  modified_base 10: mod_base = OTHER; note = backbone modification: 5'-phosphorothioate
  modified_base 11: mod_base = OTHER; note = backbone modification: 5'-phosphorothioate
  modified_base 12: mod_base = OTHER; note = backbone modification: 5'-phosphorothioate
  modified_base 13: mod_base = OTHER; note = backbone modification: 5'-phosphorothioate
  modified_base 14: mod_base = OTHER; note = backbone modification: 5'-phosphorothioate
  modified_base 15: mod_base = OTHER; note = backbone modification: 5'-phosphorothioate
  modified_base 16: mod_base = OTHER; note = backbone modification: 5'-phosphorothioate
  modified_base 17: mod_base = OTHER; note = backbone modification: 5'-phosphorothioate
  modified_base 18: mod_base = OTHER; note = backbone modification: 5'-phosphorothioate
  modified_base 19: mod_base = OTHER; note = backbone modification: 5'-phosphorothioate; note = sugar modification: lna
  modified_base 20: mod_base = OTHER; note = sugar modification: lna
tctgaattctttcaactaga

SEQ ID NO: 1240 - RNA, 18 nt, synthetic construct
  source 1..18: mol_type = other RNA; note = Antisense oligonucleotide
  modified_base 1: mod_base = OTHER; mod_base = m5c; note = backbone modification: 5'-phosphorothioate; note = sugar modification: 2'-O-methoxyethylribose
  modified_base 2: mod_base = OTHER; note = backbone modification: 5'-phosphorothioate
  modified_base 3: mod_base = OTHER; note = backbone modification: 5'-phosphorothioate
  modified_base 4: mod_base = OTHER; note = backbone modification: 5'-phosphorothioate
  modified_base 5: mod_base = OTHER; note = backbone modification: 5'-phosphorothioate
  modified_base 6: mod_base = OTHER; note = thymine; note = backbone modification: 5'-phosphorothioate; note = sugar modification: 2'-O-methoxyethylribose
  modified_base 7: mod_base = OTHER; note = backbone modification: 5'-phosphorothioate; note = thymine; note = sugar modification: 2'-O-methoxyethylribose
  modified_base 8: mod_base = m5c; mod_base = OTHER; note = backbone modification: 5'-phosphorothioate; note = sugar modification: 2'-O-methoxyethylribose
  modified_base 9: mod_base = OTHER; note = sugar modification: 2'-O-methoxyethylribose; note = backbone modification: 5'-phosphorothioate; note = thymine
  modified_base 10: mod_base = OTHER; note = backbone modification: 5'-phosphorothioate; note = sugar modification: 2'-O-methoxyethylribose; note = thymine
  modified_base 11: mod_base = OTHER; note = thymine; note = sugar modification: 2'-O-methoxyethylribose; note = backbone modification: 5'-phosphorothioate
  modified_base 12: mod_base = OTHER; mod_base = m5c; note = backbone modification: 5'-phosphorothioate; note = sugar modification: 2'-O-methoxyethylribose
  modified_base 13: mod_base = OTHER; note = sugar modification: 2'-O-methoxyethylribose; note = backbone modification: 5'-phosphorothioate
  modified_base 14: mod_base = OTHER; note = backbone modification: 5'-phosphorothioate; note = sugar modification: 2'-O-methoxyethylribose
  modified_base 15: mod_base = m5c; mod_base = OTHER; note = backbone modification: 5'-phosphorothioate; note = sugar modification: 2'-O-methoxyethylribose
  modified_base 16: mod_base = OTHER; note = backbone modification: 5'-phosphorothioate; note = thymine; note = sugar modification: 2'-O-methoxyethylribose
  modified_base 17: mod_base = OTHER; note = sugar modification: 2'-O-methoxyethylribose; note = backbone modification: 5'-phosphorothioate
  modified_base 18: mod_base = OTHER; note = sugar modification: 2'-O-methoxyethylribose
ctgaattctttcaactag

SEQ ID NO: 1241 - RNA, 18 nt, synthetic construct
  source 1..18: mol_type = other RNA; note = Antisense oligonucleotide
  modified_base 1: mod_base = OTHER; mod_base = m5c; note = backbone modification: 5'-phosphorothioate; note = sugar modification: 2'-O-methoxyethylribose
  modified_base 2: mod_base = OTHER; note = thymine; note = backbone modification: 5'-phosphorothioate; note = sugar modification: 2'-O-methoxyethylribose
  modified_base 3: mod_base = OTHER; note = sugar modification: 2'-O-methoxyethylribose; note = backbone modification: 5'-phosphorothioate
  modified_base 4: mod_base = OTHER; note = backbone modification: 5'-phosphorothioate; note = sugar modification: 2'-O-methoxyethylribose
  modified_base 5: mod_base = OTHER; note = backbone modification: 5'-phosphorothioate; note = sugar modification: 2'-O-methoxyethylribose
  modified_base 6: mod_base = OTHER; note = thymine; note = backbone modification: 5'-phosphorothioate; note = sugar modification: 2'-O-methoxyethylribose
  modified_base 7: mod_base = OTHER; note = thymine; note = backbone modification: 5'-phosphorothioate; note = sugar modification: 2'-O-methoxyethylribose
  modified_base 8: mod_base = m5c; mod_base = OTHER; note = backbone modification: 5'-phosphorothioate; note = sugar modification: 2'-O-methoxyethylribose
  modified_base 9: mod_base = OTHER; note = thymine; note = sugar modification: 2'-O-methoxyethylribose; note = backbone modification: 5'-phosphorothioate
  modified_base 10: mod_base = OTHER; note = backbone modification: 5'-phosphorothioate
  modified_base 11: mod_base = OTHER; note = backbone modification: 5'-phosphorothioate
  modified_base 12: mod_base = OTHER; note = backbone modification: 5'-phosphorothioate
  modified_base 13: mod_base = OTHER; note = backbone modification: 5'-phosphorothioate
  modified_base 14: mod_base = OTHER; note = sugar modification: 2'-O-methoxyethylribose; note = backbone modification: 5'-phosphorothioate
  modified_base 15: mod_base = m5c; mod_base = OTHER; note = backbone modification: 5'-phosphorothioate; note = sugar modification: 2'-O-methoxyethylribose
  modified_base 16: mod_base = OTHER; note = backbone modification: 5'-phosphorothioate; note = thymine; note = sugar modification: 2'-O-methoxyethylribose
  modified_base 17: mod_base = OTHER; note = sugar modification: 2'-O-methoxyethylribose; note = backbone modification: 5'-phosphorothioate
  modified_base 18: mod_base = OTHER; note = sugar modification: 2'-O-methoxyethylribose
ctgaattctttcaactag

SEQ ID NO: 1242 - RNA, 18 nt, synthetic construct
  source 1..18: mol_type = other RNA; note = Antisense oligonucleotide
  modified_base 1: mod_base = m5c; mod_base = OTHER; note = sugar modification: 2'-O-methoxyethylribose; note = backbone modification: 5'-phosphorothioate
  modified_base 2: mod_base = OTHER; note = backbone modification: 5'-phosphorothioate
  modified_base 3: mod_base = OTHER; note = backbone modification: 5'-phosphorothioate
  modified_base 4: mod_base = OTHER; note = backbone modification: 5'-phosphorothioate
  modified_base 5: mod_base = OTHER; note = backbone modification: 5'-phosphorothioate
  modified_base 6: mod_base = OTHER; note = sugar modification: 2'-O-methoxyethylribose; note = thymine; note = backbone modification: 5'-phosphorothioate
  modified_base 7: mod_base = OTHER; note = backbone modification: 5'-phosphorothioate; note = sugar modification: 2'-O-methoxyethylribose; note = thymine
  modified_base 8: mod_base = OTHER; mod_base = m5c; note = sugar modification: 2'-O-methoxyethylribose; note = backbone modification: 5'-phosphorothioate
  modified_base 9: mod_base = OTHER; note = thymine; note = backbone modification: 5'-phosphorothioate; note = sugar modification: 2'-O-methoxyethylribose
  modified_base 10: mod_base = OTHER; note = backbone modification: 5'-phosphorothioate
  modified_base 11: mod_base = OTHER; note = backbone modification: 5'-phosphorothioate
  modified_base 12: mod_base = OTHER; note = backbone modification: 5'-phosphorothioate
  modified_base 13: mod_base = OTHER; note = backbone modification: 5'-phosphorothioate
  modified_base 14: mod_base = OTHER; note = backbone modification: 5'-phosphorothioate; note = sugar modification: 2'-O-methoxyethylribose
  modified_base 15: mod_base = OTHER; mod_base = m5c; note = sugar modification: 2'-O-methoxyethylribose; note = backbone modification: 5'-phosphorothioate
  modified_base 16: mod_base = OTHER; note = thymine; note = backbone modification: 5'-phosphorothioate; note = sugar modification: 2'-O-methoxyethylribose
  modified_base 17: mod_base = OTHER; note = sugar modification: 2'-O-methoxyethylribose; note = backbone modification: 5'-phosphorothioate
  modified_base 18: mod_base = OTHER; note = sugar modification: 2'-O-methoxyethylribose
ctgaattctttcaactag

SEQ ID NO: 1243 - RNA, 18 nt, synthetic construct
  source 1..18: mol_type = other RNA; note = Antisense oligonucleotide
  modified_base 1: mod_base = OTHER; mod_base = m5c; note = backbone modification: 5'-phosphorothioate; note = sugar modification: 2'-O-methoxyethylribose
  modified_base 2: mod_base = OTHER; note = backbone modification: 5'-phosphorothioate
  modified_base 3: mod_base = OTHER; note = backbone modification: 5'-phosphorothioate
  modified_base 4: mod_base = OTHER; note = backbone modification: 5'-phosphorothioate
  modified_base 5: mod_base = OTHER; note = backbone modification: 5'-phosphorothioate
  modified_base 6: mod_base = OTHER; note = backbone modification: 5'-phosphorothioate
  modified_base 7: mod_base = OTHER; note = backbone modification: 5'-phosphorothioate
  modified_base 8: mod_base = OTHER; note = backbone modification: 5'-phosphorothioate
  modified_base 9: mod_base = OTHER; note = backbone modification: 5'-phosphorothioate
  modified_base 10: mod_base = OTHER; note = backbone modification: 5'-phosphorothioate
  modified_base 11: mod_base = OTHER; note = backbone modification: 5'-phosphorothioate
  modified_base 12: mod_base = OTHER; note = backbone modification: 5'-phosphorothioate
  modified_base 13: mod_base = OTHER; note = backbone modification: 5'-phosphorothioate
  modified_base 14: mod_base = OTHER; note = sugar modification: 2'-O-methoxyethylribose; note = backbone modification: 5'-phosphorothioate
  modified_base 15: mod_base = OTHER; mod_base = m5c; note = backbone modification: 5'-phosphorothioate; note = sugar modification: 2'-O-methoxyethylribose
  modified_base 16: mod_base = OTHER; note = thymine; note = backbone modification: 5'-phosphorothioate; note = sugar modification: 2'-O-methoxyethylribose
  modified_base 17: mod_base = OTHER; note = sugar modification: 2'-O-methoxyethylribose; note = backbone modification: 5'-phosphorothioate
  modified_base 18: mod_base = OTHER; note = sugar modification: 2'-O-methoxyethylribose
ctgaattctttcaactag

SEQ ID NO: 1244 - RNA, 18 nt, synthetic construct
  source 1..18: mol_type = other RNA; note = Antisense oligonucleotide
  modified_base 1: mod_base = OTHER; mod_base = m5c; note = backbone modification: 5'-phosphorothioate; note = sugar modification: lna
  modified_base 2: mod_base = OTHER; note = backbone modification: 5'-phosphorothioate
  modified_base 3: mod_base = OTHER; note = backbone modification: 5'-phosphorothioate
  modified_base 4: mod_base = OTHER; note = backbone modification: 5'-phosphorothioate
  modified_base 5: mod_base = OTHER; note = backbone modification: 5'-phosphorothioate
  modified_base 6: mod_base = OTHER; note = thymine; note = sugar modification: 2'-O-methoxyethylribose; note = backbone modification: 5'-phosphorothioate
  modified_base 7: mod_base = OTHER; note = thymine; note = backbone modification: 5'-phosphorothioate; note = sugar modification: 2'-O-methoxyethylribose
  modified_base 8: mod_base = m5c; mod_base = OTHER; note = sugar modification: 2'-O-methoxyethylribose; note = backbone modification: 5'-phosphorothioate
  modified_base 9: mod_base = OTHER; note = sugar modification: 2'-O-methoxyethylribose; note = thymine; note = backbone modification: 5'-phosphorothioate
  modified_base 10: mod_base = OTHER; note = sugar modification: 2'-O-methoxyethylribose; note = thymine; note = backbone modification: 5'-phosphorothioate
  modified_base 11: mod_base = OTHER; note = backbone modification: 5'-phosphorothioate; note = thymine; note = sugar modification: 2'-O-methoxyethylribose
  modified_base 12: mod_base = OTHER; mod_base = m5c; note = backbone modification: 5'-phosphorothioate; note = sugar modification: 2'-O-methoxyethylribose
  modified_base 13: mod_base = OTHER; note = backbone modification: 5'-phosphorothioate; note = sugar modification: 2'-O-methoxyethylribose
  modified_base 14: mod_base = OTHER; note = backbone modification: 5'-phosphorothioate; note = sugar modification: 2'-O-methoxyethylribose
  modified_base 15: mod_base = m5c; mod_base = OTHER; note = backbone modification: 5'-phosphorothioate; note = sugar modification: 2'-O-methoxyethylribose
  modified_base 16: mod_base = OTHER; note = sugar modification: 2'-O-methoxyethylribose; note = thymine; note = backbone modification: 5'-phosphorothioate
  modified_base 17: mod_base = OTHER; note = sugar modification: 2'-O-methoxyethylribose; note = backbone modification: 5'-phosphorothioate
  modified_base 18: mod_base = OTHER; note = sugar modification: lna
ctgaattctttcaactag

SEQ ID NO: 1245 - RNA, 18 nt, synthetic construct
  source 1..18: mol_type = other RNA; note = Antisense oligonucleotide
  modified_base 1: mod_base = m5c; mod_base = OTHER; note = sugar modification: lna; note = backbone modification: 5'-phosphorothioate
  modified_base 2: mod_base = OTHER; note = thymine; note = backbone modification: 5'-phosphorothioate; note = sugar modification: 2'-O-methoxyethylribose
  modified_base 3: mod_base = OTHER; note = sugar modification: 2'-O-methoxyethylribose; note = backbone modification: 5'-phosphorothioate
  modified_base 4: mod_base = OTHER; note = sugar modification: 2'-O-methoxyethylribose; note = backbone modification: 5'-phosphorothioate
  modified_base 5: mod_base = OTHER; note = sugar modification: 2'-O-methoxyethylribose; note = backbone modification: 5'-phosphorothioate
  modified_base 6: mod_base = OTHER; note = thymine; note = backbone modification: 5'-phosphorothioate; note = sugar modification: 2'-O-methoxyethylribose
  modified_base 7: mod_base = OTHER; note = thymine; note = sugar modification: 2'-O-methoxyethylribose; note = backbone modification: 5'-phosphorothioate
  modified_base 8: mod_base = OTHER; mod_base = m5c; note = backbone modification: 5'-phosphorothioate; note = sugar modification: 2'-O-methoxyethylribose
  modified_base 9: mod_base = OTHER; note = thymine; note = backbone modification: 5'-phosphorothioate; note = sugar modification: 2'-O-methoxyethylribose
  modified_base 10: mod_base = OTHER; note = backbone modification: 5'-phosphorothioate
  modified_base 11: mod_base = OTHER; note = backbone modification: 5'-phosphorothioate
  modified_base 12: mod_base = OTHER; note = backbone modification: 5'-phosphorothioate
  modified_base 13: mod_base = OTHER; note = backbone modification: 5'-phosphorothioate
  modified_base 14: mod_base = OTHER; note = sugar modification: 2'-O-methoxyethylribose; note = backbone modification: 5'-phosphorothioate
  modified_base 15: mod_base = m5c; mod_base = OTHER; note = sugar modification: 2'-O-methoxyethylribose; note = backbone modification: 5'-phosphorothioate
  modified_base 16: mod_base = OTHER; note = sugar modification: 2'-O-methoxyethylribose; note = backbone modification: 5'-phosphorothioate; note = thymine
  modified_base 17: mod_base = OTHER; note = sugar modification: 2'-O-methoxyethylribose; note = backbone modification: 5'-phosphorothioate
  modified_base 18: mod_base = OTHER; note = sugar modification: lna
ctgaattctttcaactag

SEQ ID NO: 1246 - RNA, 18 nt, synthetic construct
  source 1..18: mol_type = other RNA; note = Antisense oligonucleotide
  modified_base 1: mod_base = m5c; mod_base = OTHER; note = sugar modification: lna; note = backbone modification: 5'-phosphorothioate
  modified_base 2: mod_base = OTHER; note = backbone modification: 5'-phosphorothioate
  modified_base 3: mod_base = OTHER; note = backbone modification: 5'-phosphorothioate
  modified_base 4: mod_base = OTHER; note = backbone modification: 5'-phosphorothioate
  modified_base 5: mod_base = OTHER; note = backbone modification: 5'-phosphorothioate
  modified_base 6: mod_base = OTHER; note = sugar modification: 2'-O-methoxyethylribose; note = thymine; note = backbone modification: 5'-phosphorothioate
  modified_base 7: mod_base = OTHER; note = sugar modification: 2'-O-methoxyethylribose; note = backbone modification: 5'-phosphorothioate; note = thymine
  modified_base 8: mod_base = OTHER; mod_base = m5c; note = backbone modification: 5'-phosphorothioate; note = sugar modification: 2'-O-methoxyethylribose
  modified_base 9: mod_base = OTHER; note = sugar modification: 2'-O-methoxyethylribose; note = backbone modification: 5'-phosphorothioate; note = thymine
  modified_base 10: mod_base = OTHER; note = backbone modification: 5'-phosphorothioate
  modified_base 11: mod_base = OTHER; note = backbone modification: 5'-phosphorothioate
  modified_base 12: mod_base = OTHER; note = backbone modification: 5'-phosphorothioate
  modified_base 13: mod_base = OTHER; note = backbone modification: 5'-phosphorothioate
  modified_base 14: mod_base = OTHER; note = sugar modification: 2'-O-methoxyethylribose; note = backbone modification: 5'-phosphorothioate
  modified_base 15: mod_base = OTHER; mod_base = m5c; note = backbone modification: 5'-phosphorothioate; note = sugar modification: 2'-O-methoxyethylribose
  modified_base 16: mod_base = OTHER; note = sugar modification: 2'-O-methoxyethylribose; note = thymine; note = backbone modification: 5'-phosphorothioate
  modified_base 17: mod_base = OTHER; note = backbone modification: 5'-phosphorothioate; note = sugar modification: 2'-O-methoxyethylribose
  modified_base 18: mod_base = OTHER; note = sugar modification: lna
ctgaattctttcaactag

SEQ ID NO: 1247 - RNA, 18 nt, synthetic construct
  source 1..18: mol_type = other RNA; note = Antisense oligonucleotide
  modified_base 1: mod_base = OTHER; mod_base = m5c; note = backbone modification: 5'-phosphorothioate; note = sugar modification: lna
  modified_base 2: mod_base = OTHER; note = backbone modification: 5'-phosphorothioate
  modified_base 3: mod_base = OTHER; note = backbone modification: 5'-phosphorothioate
  modified_base 4: mod_base = OTHER; note = backbone modification: 5'-phosphorothioate
  modified_base 5: mod_base = OTHER; note = backbone modification: 5'-phosphorothioate
  modified_base 6: mod_base = OTHER; note = backbone modification: 5'-phosphorothioate
  modified_base 7: mod_base = OTHER; note = backbone modification: 5'-phosphorothioate
  modified_base 8: mod_base = OTHER; note = backbone modification: 5'-phosphorothioate
  modified_base 9: mod_base = OTHER; note = backbone modification: 5'-phosphorothioate
  modified_base 10: mod_base = OTHER; note = backbone modification: 5'-phosphorothioate
  modified_base 11: mod_base = OTHER; note = backbone modification: 5'-phosphorothioate
  modified_base 12: mod_base = OTHER; note = backbone modification: 5'-phosphorothioate
  modified_base 13: mod_base = OTHER; note = backbone modification: 5'-phosphorothioate
  modified_base 14: mod_base = OTHER; note = backbone modification: 5'-phosphorothioate; note = sugar modification: 2'-O-methoxyethylribose
  modified_base 15: mod_base = m5c; mod_base = OTHER; note = backbone modification: 5'-phosphorothioate; note = sugar modification: 2'-O-methoxyethylribose
  modified_base 16: mod_base = OTHER; note = backbone modification: 5'-phosphorothioate; note = thymine; note = sugar modification: 2'-O-methoxyethylribose
  modified_base 17: mod_base = OTHER; note = backbone modification: 5'-phosphorothioate; note = sugar modification: 2'-O-methoxyethylribose
  modified_base 18: mod_base = OTHER; note = sugar modification: lna
ctgaattctttcaactag

SEQ ID NO: 1248 - RNA, 18 nt, synthetic construct
  source 1..18: mol_type = other RNA; note = Antisense oligonucleotide
  modified_base 1: mod_base = OTHER; mod_base = m5c; note = sugar modification: 2'-O-methoxyethylribose; note = backbone modification: 5'-phosphorothioate
  modified_base 2: mod_base = OTHER; note = sugar modification: 2'-O-methoxyethylribose; note = thymine; note = backbone modification: 5'-phosphorothioate
  modified_base 3: mod_base = OTHER; note = sugar modification: lna; note = backbone modification: 5'-phosphorothioate
  modified_base 4: mod_base = OTHER; note = sugar modification: 2'-O-methoxyethylribose; note = backbone modification: 5'-phosphorothioate
  modified_base 5: mod_base = OTHER; note = sugar modification: 2'-O-methoxyethylribose; note = backbone modification: 5'-phosphorothioate
  modified_base 6: mod_base = OTHER; note = thymine; note = sugar modification: 2'-O-methoxyethylribose; note = backbone modification: 5'-phosphorothioate
  modified_base 7: mod_base = OTHER; note = thymine; note = backbone modification: 5'-phosphorothioate; note = sugar modification: 2'-O-methoxyethylribose
  modified_base 8: mod_base = m5c; mod_base = OTHER; note = backbone modification: 5'-phosphorothioate; note = sugar modification: 2'-O-methoxyethylribose
  modified_base 9: mod_base = OTHER; note = thymine; note = sugar modification: 2'-O-methoxyethylribose; note = backbone modification: 5'-phosphorothioate
  modified_base 10: mod_base = OTHER; note = thymine; note = backbone modification: 5'-phosphorothioate; note = sugar modification: 2'-O-methoxyethylribose
  modified_base 11: mod_base = OTHER; note = backbone modification: 5'-phosphorothioate; note = sugar modification: 2'-O-methoxyethylribose; note = thymine
  modified_base 12: mod_base = OTHER; mod_base = m5c; note = sugar modification: lna; note = backbone modification: 5'-phosphorothioate
  modified_base 13: mod_base = OTHER; note = sugar modification: 2'-O-methoxyethylribose; note = backbone modification: 5'-phosphorothioate
  modified_base 14: mod_base = OTHER; note = sugar modification: 2'-O-methoxyethylribose; note = backbone modification: 5'-phosphorothioate
  modified_base 15: mod_base = m5c; mod_base = OTHER; note = backbone modification: 5'-phosphorothioate; note = sugar modification: 2'-O-methoxyethylribose
  modified_base 16: mod_base = OTHER; note = sugar modification: 2'-O-methoxyethylribose; note = backbone modification: 5'-phosphorothioate; note = thymine
  modified_base 17: mod_base = OTHER; note = sugar modification: 2'-O-methoxyethylribose; note = backbone modification: 5'-phosphorothioate
  modified_base 18: mod_base = OTHER; note = sugar modification: 2'-O-methoxyethylribose
ctgaattctttcaactag

SEQ ID NO: 1249 - RNA, 18 nt, synthetic construct
  source 1..18: mol_type = other RNA; note = Antisense oligonucleotide
  modified_base 1: mod_base = OTHER; mod_base = m5c; note = sugar modification: 2'-O-methoxyethylribose; note = backbone modification: 5'-phosphorothioate
  modified_base 2: mod_base = OTHER; note = backbone modification: 5'-phosphorothioate; note = sugar modification: lna; note = thymine
  modified_base 3: mod_base = OTHER; note = sugar modification: lna; note = backbone modification: 5'-phosphorothioate
  modified_base 4: mod_base = OTHER; note = sugar modification: 2'-O-methoxyethylribose; note = backbone modification: 5'-phosphorothioate
  modified_base 5: mod_base = OTHER; note = backbone modification: 5'-phosphorothioate; note = sugar modification: 2'-O-methoxyethylribose
  modified_base 6: mod_base = OTHER; note = thymine; note = sugar modification: 2'-O-methoxyethylribose; note = backbone modification: 5'-phosphorothioate
  modified_base 7: mod_base = OTHER; note = backbone modification: 5'-phosphorothioate; note = thymine; note = sugar modification: 2'-O-methoxyethylribose
  modified_base 8: mod_base = OTHER; mod_base = m5c; note = sugar modification: 2'-O-methoxyethylribose; note = backbone modification: 5'-phosphorothioate
  modified_base 9: mod_base = OTHER; note = sugar modification: 2'-O-methoxyethylribose; note = thymine; note = backbone modification: 5'-phosphorothioate
  modified_base 10: mod_base = OTHER; note = backbone modification: 5'-phosphorothioate; note = sugar modification: 2'-O-methoxyethylribose; note = thymine
  modified_base 11: mod_base = OTHER; note = thymine; note = sugar modification: 2'-O-methoxyethylribose; note = backbone modification: 5'-phosphorothioate
  modified_base 12: mod_base = m5c; mod_base = OTHER; note = sugar modification: 2'-O-methoxyethylribose; note = backbone modification: 5'-phosphorothioate
  modified_base 13: mod_base = OTHER; note = sugar modification: 2'-O-methoxyethylribose; note = backbone modification: 5'-phosphorothioate
  modified_base 14: mod_base = OTHER; note = sugar modification: 2'-O-methoxyethylribose; note = backbone modification: 5'-phosphorothioate
  modified_base 15: mod_base = OTHER; mod_base = m5c; note = backbone modification: 5'-phosphorothioate; note = sugar modification: 2'-O-methoxyethylribose
  modified_base 16: mod_base = OTHER; note = thymine; note = backbone modification: 5'-phosphorothioate; note = sugar modification: 2'-O-methoxyethylribose
  modified_base 17: mod_base = OTHER; note = sugar modification: 2'-O-methoxyethylribose; note = backbone modification: 5'-phosphorothioate
  modified_base 18: mod_base = OTHER; note = sugar modification: 2'-O-methoxyethylribose
ctgaattctttcaactag

SEQ ID NO: 1250 - RNA, 18 nt, synthetic construct
  source 1..18: mol_type = other RNA; note = Antisense oligonucleotide
  modified_base 1: mod_base = m5c; mod_base = OTHER; note = sugar modification: 2'-O-methoxyethylribose; note = backbone modification: 5'-phosphorothioate
  modified_base 2: mod_base = OTHER; note = sugar modification: 2'-O-methoxyethylribose; note = backbone modification: 5'-phosphorothioate; note = thymine
  modified_base 3: mod_base = OTHER; note = backbone modification: 5'-phosphorothioate; note = sugar modification: 2'-O-methoxyethylribose
  modified_base 4: mod_base = OTHER; note = sugar modification: 2'-O-methoxyethylribose; note = backbone modification: 5'-phosphorothioate
  modified_base 5: mod_base = OTHER; note = sugar modification: 2'-O-methoxyethylribose; note = backbone modification: 5'-phosphorothioate
  modified_base 6: mod_base = OTHER; note = sugar modification: 2'-O-methoxyethylribose; note = thymine; note = backbone modification: 5'-phosphorothioate
  modified_base 7: mod_base = OTHER; note = thymine; note = backbone modification: 5'-phosphorothioate; note = sugar modification: 2'-O-methoxyethylribose
  modified_base 8: mod_base = m5c; mod_base = OTHER; note = sugar modification: 2'-O-methoxyethylribose; note = backbone modification: 5'-phosphorothioate
  modified_base 9: mod_base = OTHER; note = thymine; note = sugar modification: 2'-O-methoxyethylribose; note = backbone modification: 5'-phosphorothioate
  modified_base 10: mod_base = OTHER; note = backbone modification: 5'-phosphorothioate; note = thymine; note = sugar modification: 2'-O-methoxyethylribose
  modified_base 11: mod_base = OTHER; note = backbone modification: 5'-phosphorothioate; note = sugar modification: 2'-O-methoxyethylribose; note = thymine
  modified_base 12: mod_base = OTHER; mod_base = m5c; note = backbone modification: 5'-phosphorothioate; note = sugar modification: lna
  modified_base 13: mod_base = OTHER; note = sugar modification: lna; note = backbone modification: 5'-phosphorothioate
  modified_base 14: mod_base = OTHER; note = backbone modification: 5'-phosphorothioate; note = sugar modification: 2'-O-methoxyethylribose
  modified_base 15: mod_base = m5c; mod_base = OTHER; note = backbone modification: 5'-phosphorothioate; note = sugar modification: 2'-O-methoxyethylribose
  modified_base 16: mod_base = OTHER; note = backbone modification: 5'-phosphorothioate; note = sugar modification: 2'-O-methoxyethylribose; note = thymine
  modified_base 17: mod_base = OTHER; note = backbone modification: 5'-phosphorothioate; note = sugar modification: 2'-O-methoxyethylribose
  modified_base 18: mod_base = OTHER; note = sugar modification: 2'-O-methoxyethylribose
ctgaattctttcaactag

SEQ ID NO: 1251 - RNA, 18 nt, synthetic construct
  source 1..18: mol_type = other RNA; note = Antisense oligonucleotide
  modified_base 1: mod_base = m5c; mod_base = OTHER; note = sugar modification: 2'-O-methoxyethylribose; note = backbone modification: 5'-phosphorothioate
  modified_base 2: mod_base = OTHER; note = thymine; note = backbone modification: 5'-phosphorothioate; note = sugar modification: lna
  modified_base 3: mod_base = OTHER; note = sugar modification: lna; note = backbone modification: 5'-phosphorothioate
  modified_base 4: mod_base = OTHER; note = sugar modification: 2'-O-methoxyethylribose; note = backbone modification: 5'-phosphorothioate
  modified_base 5: mod_base = OTHER; note = sugar modification: 2'-O-methoxyethylribose; note = backbone modification: 5'-phosphorothioate
  modified_base 6: mod_base = OTHER; note = backbone modification: 5'-phosphorothioate; note = sugar modification: 2'-O-methoxyethylribose; note = thymine
  modified_base 7: mod_base = OTHER; note = thymine; note = backbone modification: 5'-phosphorothioate; note = sugar modification: 2'-O-methoxyethylribose
  modified_base 8: mod_base = OTHER; mod_base = m5c; note = backbone modification: 5'-phosphorothioate; note = sugar modification: 2'-O-methoxyethylribose
  modified_base 9: mod_base = OTHER; note = sugar modification: 2'-O-methoxyethylribose; note = backbone modification: 5'-phosphorothioate; note = thymine
  modified_base 10: mod_base = OTHER; note = sugar modification: 2'-O-methoxyethylribose; note = backbone modification: 5'-phosphorothioate; note = thymine
  modified_base 11: mod_base = OTHER; note = backbone modification: 5'-phosphorothioate; note = sugar modification: 2'-O-methoxyethylribose; note = thymine
  modified_base 12: mod_base = OTHER; mod_base = m5c; note = backbone modification: 5'-phosphorothioate; note = sugar modification: lna
  modified_base 13: mod_base = OTHER; note = sugar modification: lna; note = backbone modification: 5'-phosphorothioate
  modified_base 14: mod_base = OTHER; note = backbone modification: 5'-phosphorothioate; note = sugar modification: 2'-O-methoxyethylribose
  modified_base 15: mod_base = m5c; mod_base = OTHER; note = backbone modification: 5'-phosphorothioate; note = sugar modification: 2'-O-methoxyethylribose
  modified_base 16: mod_base = OTHER; note = sugar modification: 2'-O-methoxyethylribose; note = backbone modification: 5'-phosphorothioate; note = thymine
  modified_base 17: mod_base = OTHER; note = backbone modification: 5'-phosphorothioate; note = sugar modification: 2'-O-methoxyethylribose
  modified_base 18: mod_base = OTHER; note = sugar modification: 2'-O-methoxyethylribose
ctgaattctttcaactag

SEQ ID NO: 1252 - RNA, 18 nt, synthetic construct
  source 1..18: mol_type = other RNA; note = Antisense oligonucleotide
  modified_base 1: mod_base = m5c; mod_base = OTHER; note = sugar modification: 2'-O-methoxyethylribose; note = backbone modification: 5'-phosphorothioate
  modified_base 2: mod_base = OTHER; note = backbone modification: 5'-phosphorothioate; note = thymine; note = sugar modification: 2'-O-methoxyethylribose
  modified_base 3: mod_base = OTHER; note = backbone modification: 5'-phosphorothioate; note = sugar modification: 2'-O-methoxyethylribose
  modified_base 4: mod_base = OTHER; note = sugar modification: lna; note = backbone modification: 5'-phosphorothioate
  modified_base 5: mod_base = OTHER; note = backbone modification: 5'-phosphorothioate; note = sugar modification: lna
  modified_base 6: mod_base = OTHER; note = backbone modification: 5'-phosphorothioate; note = thymine; note = sugar modification: 2'-O-methoxyethylribose
  modified_base 7: mod_base = OTHER; note = sugar modification: 2'-O-methoxyethylribose; note = backbone modification: 5'-phosphorothioate; note = thymine
  modified_base 8: mod_base = OTHER; mod_base = m5c; note = sugar modification: 2'-O-methoxyethylribose; note = backbone modification: 5'-phosphorothioate
  modified_base 9: mod_base = OTHER; note = thymine; note = backbone modification: 5'-phosphorothioate; note = sugar modification: 2'-O-methoxyethylribose
  modified_base 10: mod_base = OTHER; note = thymine; note = sugar modification: lna; note = backbone modification: 5'-phosphorothioate
  modified_base 11: mod_base = OTHER; note = sugar modification: lna; note = backbone modification: 5'-phosphorothioate; note = thymine
  modified_base 12: mod_base = OTHER; mod_base = m5c; note = backbone modification: 5'-phosphorothioate; note = sugar modification: 2'-O-methoxyethylribose
  modified_base 13: mod_base = OTHER; note = backbone modification: 5'-phosphorothioate; note = sugar modification: 2'-O-methoxyethylribose
  modified_base 14: mod_base = OTHER; note = backbone modification: 5'-phosphorothioate; note = sugar modification: 2'-O-methoxyethylribose
  modified_base 15: mod_base = m5c; mod_base = OTHER; note = sugar modification: 2'-O-methoxyethylribose; note = backbone modification: 5'-phosphorothioate
  modified_base 16: mod_base = OTHER; note = sugar modification: 2'-O-methoxyethylribose; note = thymine; note = backbone modification: 5'-phosphorothioate
  modified_base 17: mod_base = OTHER; note = backbone modification: 5'-phosphorothioate; note = sugar modification: 2'-O-methoxyethylribose
  modified_base 18: mod_base = OTHER; note = sugar modification: 2'-O-methoxyethylribose
ctgaattctttcaactag

SEQ ID NO: 1253 - RNA, 18 nt, synthetic construct
  source 1..18: mol_type = other RNA; note = Antisense oligonucleotide
  modified_base 1: mod_base = OTHER; mod_base = m5c; note = backbone modification: 5'-phosphorothioate; note = sugar modification: 2'-O-methoxyethylribose
  modified_base 2: mod_base = OTHER; note = sugar modification: 2'-O-methoxyethylribose; note = backbone modification: 5'-phosphorothioate; note = thymine
  modified_base 3: mod_base = OTHER; note = backbone modification: 5'-phosphorothioate
  modified_base 4: mod_base = OTHER; note = backbone modification: 5'-phosphorothioate
  modified_base 5: mod_base = OTHER; note = backbone modification: 5'-phosphorothioate
  modified_base 6: mod_base = OTHER; note = backbone modification: 5'-phosphorothioate
  modified_base 7: mod_base = OTHER; note = backbone modification: 5'-phosphorothioate
  modified_base 8: mod_base = OTHER; note = backbone modification: 5'-phosphorothioate
  modified_base 9: mod_base = OTHER; note = backbone modification: 5'-phosphorothioate; note = sugar modification: 2'-O-methoxyethylribose; note = thymine
  modified_base 10: mod_base = OTHER; note = sugar modification: 2'-O-methoxyethylribose; note = backbone modification: 5'-phosphorothioate; note = thymine
  modified_base 11: mod_base = OTHER; note = backbone modification: 5'-phosphorothioate; note = thymine; note = sugar modification: 2'-O-methoxyethylribose
  modified_base 12: mod_base = m5c; mod_base = OTHER; note = backbone modification: 5'-phosphorothioate; note = sugar modification: 2'-O-methoxyethylribose
  modified_base 13: mod_base = OTHER; note = sugar modification: 2'-O-methoxyethylribose; note = backbone modification: 5'-phosphorothioate
  modified_base 14: mod_base = OTHER; note = sugar modification: 2'-O-methoxyethylribose; note = backbone modification: 5'-phosphorothioate
  modified_base 15: mod_base = m5c; mod_base = OTHER; note = backbone modification: 5'-phosphorothioate; note = sugar modification: 2'-O-methoxyethylribose
  modified_base 16: mod_base = OTHER; note = sugar modification: 2'-O-methoxyethylribose; note = backbone modification: 5'-phosphorothioate; note = thymine
  modified_base 17: mod_base = OTHER; note = backbone modification: 5'-phosphorothioate; note = sugar modification: 2'-O-methoxyethylribose
  modified_base 18: mod_base = OTHER; note = sugar modification: 2'-O-methoxyethylribose
ctgaattctttcaactag

SEQ ID NO: 1254 - RNA, 18 nt, synthetic construct
  source 1..18: mol_type = other RNA; note = Antisense oligonucleotide
  modified_base 1: mod_base = m5c; mod_base = OTHER; note = backbone modification: 5'-phosphorothioate; note = sugar modification: 2'-O-methoxyethylribose
  modified_base 2: mod_base = OTHER; note = backbone modification: 5'-phosphorothioate; note = sugar modification: 2'-O-methoxyethylribose; note = thymine
  modified_base 3: mod_base = OTHER; note = sugar modification: lna; note = backbone modification: 5'-phosphorothioate
  modified_base 4: mod_base = OTHER; note = sugar modification: lna; note = backbone modification: 5'-phosphorothioate
  modified_base 5: mod_base = OTHER; note = sugar modification: lna; note = backbone modification: 5'-phosphorothioate
  modified_base 6: mod_base = OTHER; note = backbone modification: 5'-phosphorothioate; note = thymine; note = sugar modification: lna
  modified_base 7: mod_base = OTHER; note = sugar modification: lna; note = backbone modification: 5'-phosphorothioate; note = thymine
  modified_base 8: mod_base = OTHER; mod_base = m5c; note = backbone modification: 5'-phosphorothioate; note = sugar modification: lna
  modified_base 9: mod_base = OTHER; note = backbone modification: 5'-phosphorothioate; note = sugar modification: 2'-O-methoxyethylribose; note = thymine
  modified_base 10: mod_base = OTHER; note = sugar modification: 2'-O-methoxyethylribose; note = thymine; note = backbone modification: 5'-phosphorothioate
  modified_base 11: mod_base = OTHER; note = backbone modification: 5'-phosphorothioate; note = thymine; note = sugar modification: 2'-O-methoxyethylribose
  modified_base 12: mod_base = m5c; mod_base = OTHER; note = sugar modification: 2'-O-methoxyethylribose; note = backbone modification: 5'-phosphorothioate
  modified_base 13: mod_base = OTHER; note = sugar modification: 2'-O-methoxyethylribose; note = backbone modification: 5'-phosphorothioate
  modified_base 14: mod_base = OTHER; note = sugar modification: 2'-O-methoxyethylribose; note = backbone modification: 5'-phosphorothioate
  modified_base 15: mod_base = OTHER; mod_base = m5c; note = backbone modification: 5'-phosphorothioate; note = sugar modification: 2'-O-methoxyethylribose
  modified_base 16: mod_base = OTHER; note = backbone modification: 5'-phosphorothioate; note = thymine; note = sugar modification: 2'-O-methoxyethylribose
  modified_base 17: mod_base = OTHER; note = backbone modification: 5'-phosphorothioate; note = sugar modification: 2'-O-methoxyethylribose
  modified_base 18: mod_base = OTHER; note = sugar modification: 2'-O-methoxyethylribose
ctgaattctttcaactag

SEQ ID NO: 1255 - RNA, 18 nt, synthetic construct
  source 1..18: mol_type = other RNA; note = Antisense oligonucleotide
  modified_base 1: mod_base = m5c; mod_base = OTHER; note = backbone modification: 5'-phosphorothioate; note = sugar modification: lna
  modified_base 2: mod_base = OTHER; note = sugar modification: 2'-O-methoxyethylribose; note = thymine; note = backbone modification: 5'-phosphorothioate
  modified_base 3: mod_base = OTHER; note = backbone modification: 5'-phosphorothioate
  modified_base 4: mod_base = OTHER; note = backbone modification: 5'-phosphorothioate
  modified_base 5: mod_base = OTHER; note = backbone modification: 5'-phosphorothioate
  modified_base 6: mod_base = OTHER; note = backbone modification: 5'-phosphorothioate
  modified_base 7: mod_base = OTHER; note = backbone modification: 5'-phosphorothioate
  modified_base 8: mod_base = OTHER; note = backbone modification: 5'-phosphorothioate
  modified_base 9: mod_base = OTHER; note = backbone modification: 5'-phosphorothioate; note = thymine; note = sugar modification: 2'-O-methoxyethylribose
  modified_base 10: mod_base = OTHER; note = backbone modification: 5'-phosphorothioate; note = thymine; note = sugar modification: 2'-O-methoxyethylribose
  modified_base 11: mod_base = OTHER; note = thymine; note = backbone modification: 5'-phosphorothioate; note = sugar modification: 2'-O-methoxyethylribose
  modified_base 12: mod_base = OTHER; mod_base = m5c; note = sugar modification: 2'-O-methoxyethylribose; note = backbone modification: 5'-phosphorothioate
  modified_base 13: mod_base = OTHER; note = backbone modification: 5'-phosphorothioate; note = sugar modification: 2'-O-methoxyethylribose
  modified_base 14: mod_base = OTHER; note = sugar modification: 2'-O-methoxyethylribose; note = backbone modification: 5'-phosphorothioate
  modified_base 15: mod_base = m5c; mod_base = OTHER; note = sugar modification: 2'-O-methoxyethylribose; note = backbone modification: 5'-phosphorothioate
  modified_base 16: mod_base = OTHER; note = thymine; note = sugar modification: 2'-O-methoxyethylribose; note = backbone modification: 5'-phosphorothioate
  modified_base 17: mod_base = OTHER; note = sugar modification: 2'-O-methoxyethylribose; note = backbone modification: 5'-phosphorothioate
  modified_base 18: mod_base = OTHER; note = sugar modification: lna
ctgaattctttcaactag

SEQ ID NO: 1256 - RNA, 18 nt, synthetic construct
  source 1..18: mol_type = other RNA; note = Antisense oligonucleotide
  modified_base 1: mod_base = m5c; mod_base = OTHER; note = sugar modification: lna; note = backbone modification: 5'-phosphorothioate
  modified_base 2: mod_base = OTHER; note = thymine; note = backbone modification: 5'-phosphorothioate; note = sugar modification: 2'-O-methoxyethylribose
  modified_base 3: mod_base = OTHER; note = backbone modification: 5'-phosphorothioate; note = sugar modification: 2'-O-methoxyethylribose
  modified_base 4: mod_base = OTHER; note = backbone modification: 5'-phosphorothioate; note = sugar modification: 2'-O-methoxyethylribose
  modified_base 5: mod_base = OTHER; note = sugar modification: 2'-O-methoxyethylribose; note = backbone modification: 5'-phosphorothioate
  modified_base 6: mod_base = OTHER; note = thymine; note = backbone modification: 5'-phosphorothioate; note = sugar modification: 2'-O-methoxyethylribose
  modified_base 7: mod_base = OTHER; note = thymine; note = backbone modification: 5'-phosphorothioate; note = sugar modification: 2'-O-methoxyethylribose
  modified_base 8: mod_base = OTHER; mod_base = m5c; note = backbone modification: 5'-phosphorothioate; note = sugar modification: lna
  modified_base 9: mod_base = OTHER; note = backbone modification: 5'-phosphorothioate; note = thymine; note = sugar modification: 2'-O-methoxyethylribose
  modified_base 10: mod_base = OTHER; note = backbone modification: 5'-phosphorothioate; note = thymine; note = sugar modification: 2'-O-methoxyethylribose
  modified_base 11: mod_base = OTHER; note = backbone modification: 5'-phosphorothioate; note = thymine; note = sugar modification: 2'-O-methoxyethylribose
  modified_base 12: mod_base = OTHER; mod_base = m5c; note = sugar modification: 2'-O-methoxyethylribose; note = backbone modification: 5'-phosphorothioate
  modified_base 13: mod_base = OTHER; note = sugar modification: 2'-O-methoxyethylribose; note = backbone modification: 5'-phosphorothioate
  modified_base 14: mod_base = OTHER; note = sugar modification: 2'-O-methoxyethylribose; note = backbone modification: 5'-phosphorothioate
  modified_base 15: mod_base = OTHER; mod_base = m5c; note = sugar modification: 2'-O-methoxyethylribose; note = backbone modification: 5'-phosphorothioate
  modified_base 16: mod_base = OTHER; note = sugar modification: 2'-O-methoxyethylribose; note = thymine; note = backbone modification: 5'-phosphorothioate
  modified_base 17: mod_base = OTHER; note = backbone modification: 5'-phosphorothioate; note = sugar modification: 2'-O-methoxyethylribose
  modified_base 18: mod_base = OTHER; note = sugar modification: lna
ctgaattctttcaactag

SEQ ID NO: 1257 - RNA, 18 nt, synthetic construct
  source 1..18: mol_type = other RNA; note = Antisense oligonucleotide
  modified_base 1: mod_base = OTHER; mod_base = m5c; note = sugar modification: 2'-O-methoxyethylribose; note = backbone modification: 5'-phosphorothioate
  modified_base 2: mod_base = OTHER; note = thymine; note = sugar modification: 2'-O-methoxyethylribose; note = backbone modification: 5'-phosphorothioate
  modified_base 3: mod_base = OTHER; note = sugar modification: lna; note = backbone modification: 5'-phosphorothioate
  modified_base 4: mod_base = OTHER; note = backbone modification: 5'-phosphorothioate
  modified_base 5: mod_base = OTHER; note = backbone modification: 5'-phosphorothioate
  modified_base 6: mod_base = OTHER; note = backbone modification: 5'-phosphorothioate
  modified_base 7: mod_base = OTHER; note = backbone modification: 5'-phosphorothioate
  modified_base 8: mod_base = m5c; mod_base = OTHER; note = sugar modification: lna; note = backbone modification: 5'-phosphorothioate
  modified_base 9: mod_base = OTHER; note = thymine; note = sugar modification: 2'-O-methoxyethylribose; note = backbone modification: 5'-phosphorothioate
  modified_base 10: mod_base = OTHER; note = thymine; note = sugar modification: 2'-O-methoxyethylribose; note = backbone modification: 5'-phosphorothioate
  modified_base 11: mod_base = OTHER; note = thymine; note = sugar modification: 2'-O-methoxyethylribose; note = backbone modification: 5'-phosphorothioate
  modified_base 12: mod_base = m5c; mod_base = OTHER; note = sugar modification: 2'-O-methoxyethylribose; note = backbone modification: 5'-phosphorothioate
  modified_base 13: mod_base = OTHER; note = backbone modification: 5'-phosphorothioate; note = sugar modification: 2'-O-methoxyethylribose
  modified_base 14: mod_base = OTHER; note = backbone modification: 5'-phosphorothioate; note = sugar modification: 2'-O-methoxyethylribose
  modified_base 15: mod_base = OTHER; mod_base = m5c; note = backbone modification: 5'-phosphorothioate; note = sugar modification: 2'-O-methoxyethylribose
  modified_base 16: mod_base = OTHER; note = backbone modification: 5'-phosphorothioate; note = thymine; note = sugar modification: 2'-O-methoxyethylribose
  modified_base 17: mod_base = OTHER; note = sugar modification: 2'-O-methoxyethylribose; note = backbone modification: 5'-phosphorothioate
  modified_base 18: mod_base = OTHER; note = sugar modification: 2'-O-methoxyethylribose
ctgaattctttcaactag

SEQ ID NO: 1258 - RNA, 18 nt, synthetic construct
  source 1..18: mol_type = other RNA; note = Antisense oligonucleotide
  modified_base 1: mod_base = m5c; mod_base = OTHER; note = backbone modification: 5'-phosphorothioate; note = sugar modification: lna
  modified_base 2: mod_base = OTHER; note = sugar modification: 2'-O-methoxyethylribose; note = backbone modification: 5'-phosphorothioate; note = thymine
  modified_base 3: mod_base = OTHER; note = sugar modification: 2'-O-methoxyethylribose; note = backbone modification: 5'-phosphorothioate
  modified_base 4: mod_base = OTHER; note = backbone modification: 5'-phosphorothioate; note = sugar modification: 2'-O-methoxyethylribose
  modified_base 5: mod_base = OTHER; note = backbone modification: 5'-phosphorothioate; note = sugar modification: lna
  modified_base 6: mod_base = OTHER; note = sugar modification: lna; note = backbone modification: 5'-phosphorothioate; note = thymine
  modified_base 7: mod_base = OTHER; note = thymine; note = sugar modification: 2'-O-methoxyethylribose; note = backbone modification: 5'-phosphorothioate
  modified_base 8: mod_base = m5c; mod_base = OTHER; note = backbone modification: 5'-phosphorothioate; note = sugar modification: 2'-O-methoxyethylribose
  modified_base 9: mod_base = OTHER; note = sugar modification: 2'-O-methoxyethylribose; note = backbone modification: 5'-phosphorothioate; note = thymine
  modified_base 10: mod_base = OTHER; note = backbone modification: 5'-phosphorothioate; note = thymine; note = sugar modification: 2'-O-methoxyethylribose
  modified_base 11: mod_base = OTHER; note = sugar modification: 2'-O-methoxyethylribose; note = backbone modification: 5'-phosphorothioate; note = thymine
  modified_base 12: mod_base = m5c; mod_base = OTHER; note = sugar modification: 2'-O-methoxyethylribose; note = backbone modification: 5'-phosphorothioate
  modified_base 13: mod_base = OTHER; note = sugar modification: 2'-O-methoxyethylribose; note = backbone modification: 5'-phosphorothioate
  modified_base 14: mod_base = OTHER; note = sugar modification: 2'-O-methoxyethylribose; note = backbone modification: 5'-phosphorothioate
  modified_base 15: mod_base = OTHER; mod_base = m5c; note = sugar modification: 2'-O-methoxyethylribose; note = backbone modification: 5'-phosphorothioate
  modified_base 16: mod_base = OTHER; note = sugar modification: 2'-O-methoxyethylribose; note = thymine; note = backbone modification: 5'-phosphorothioate
  modified_base 17: mod_base = OTHER; note = backbone modification: 5'-phosphorothioate; note = sugar modification: 2'-O-methoxyethylribose
  modified_base 18: mod_base = OTHER; note = sugar modification: lna
ctgaattctttcaactag

SEQ ID NO: 1259 - RNA, 18 nt, synthetic construct
  source 1..18: mol_type = other RNA; note = Antisense oligonucleotide
  modified_base 1: mod_base = OTHER; mod_base = m5c; note = backbone modification: 5'-phosphorothioate; note = sugar modification: 2'-O-methoxyethylribose
  modified_base 2: mod_base = OTHER; note = thymine; note = backbone modification: 5'-phosphorothioate; note = sugar modification: 2'-O-methoxyethylribose
  modified_base 3: mod_base = OTHER; note = sugar modification: lna; note = backbone modification: 5'-phosphorothioate
  modified_base 4: mod_base = OTHER; note = sugar modification: 2'-O-methoxyethylribose; note = backbone modification: 5'-phosphorothioate
  modified_base 5: mod_base = OTHER; note = sugar modification: 2'-O-methoxyethylribose; note = backbone modification: 5'-phosphorothioate
  modified_base 6: mod_base = OTHER; note = sugar modification: 2'-O-methoxyethylribose; note = thymine; note = backbone modification: 5'-phosphorothioate
  modified_base 7: mod_base = OTHER; note = thymine; note = backbone modification: 5'-phosphorothioate; note = sugar modification: 2'-O-methoxyethylribose
  modified_base 8: mod_base = OTHER; mod_base = m5c; note = backbone modification: 5'-phosphorothioate; note = sugar modification: lna
  modified_base 9: mod_base = OTHER; note = thymine; note = backbone modification: 5'-phosphorothioate; note = sugar modification: 2'-O-methoxyethylribose
  modified_base 10: mod_base = OTHER; note = sugar modification: 2'-O-methoxyethylribose; note = thymine; note = backbone modification: 5'-phosphorothioate
  modified_base 11: mod_base = OTHER; note = sugar modification: 2'-O-methoxyethylribose; note = thymine; note = backbone modification: 5'-phosphorothioate
  modified_base 12: mod_base = OTHER; mod_base = m5c; note = backbone modification: 5'-phosphorothioate; note = sugar modification: 2'-O-methoxyethylribose
  modified_base 13: mod_base = OTHER; note = sugar modification: 2'-O-methoxyethylribose; note = backbone modification: 5'-phosphorothioate
  modified_base 14: mod_base = OTHER; note = sugar modification: 2'-O-methoxyethylribose; note = backbone modification: 5'-phosphorothioate
  modified_base 15: mod_base = OTHER; mod_base = m5c; note = sugar modification: 2'-O-methoxyethylribose; note = backbone modification: 5'-phosphorothioate
  modified_base 16: mod_base = OTHER; note = thymine; note = sugar modification: 2'-O-methoxyethylribose; note = backbone modification: 5'-phosphorothioate
  modified_base 17: mod_base = OTHER; note = sugar modification: 2'-O-methoxyethylribose; note = backbone modification: 5'-phosphorothioate
  modified_base 18: mod_base = OTHER; note = sugar modification: 2'-O-methoxyethylribose
ctgaattctttcaactag

SEQ ID NO: 1260 - RNA, 18 nt, synthetic construct
  source 1..18: mol_type = other RNA; note = Antisense oligonucleotide
  modified_base 1: mod_base = OTHER; mod_base = m5c; note = sugar modification: lna; note = backbone modification: 5'-phosphorothioate
  modified_base 2: mod_base = OTHER; note = sugar modification: 2'-O-methoxyethylribose; note = backbone modification: 5'-phosphorothioate; note = thymine
  modified_base 3: mod_base = OTHER; note = backbone modification: 5'-phosphorothioate
  modified_base 4: mod_base = OTHER; note = backbone modification: 5'-phosphorothioate
  modified_base 5: mod_base = OTHER; note = backbone modification: 5'-phosphorothioate; note = sugar modification: 2'-O-methoxyethylribose
  modified_base 6: mod_base = OTHER; note = thymine; note = backbone modification: 5'-phosphorothioate; note = sugar modification: 2'-O-methoxyethylribose
  modified_base 7: mod_base = OTHER; note = backbone modification: 5'-phosphorothioate
  modified_base 8: mod_base = OTHER; note = backbone modification: 5'-phosphorothioate
  modified_base 9: mod_base = OTHER; note = backbone modification: 5'-phosphorothioate; note = thymine; note = sugar modification: 2'-O-methoxyethylribose
  modified_base 10: mod_base = OTHER; note = thymine; note = sugar modification: 2'-O-methoxyethylribose; note = backbone modification: 5'-phosphorothioate
  modified_base 11: mod_base = OTHER; note = backbone modification: 5'-phosphorothioate; note = thymine; note = sugar modification: 2'-O-methoxyethylribose
  modified_base 12: mod_base = OTHER; mod_base = m5c; note = backbone modification: 5'-phosphorothioate; note = sugar modification: 2'-O-methoxyethylribose
  modified_base 13: mod_base = OTHER; note = sugar modification: 2'-O-methoxyethylribose; note = backbone modification: 5'-phosphorothioate
  modified_base 14: mod_base = OTHER; note = backbone modification: 5'-phosphorothioate; note = sugar modification: 2'-O-methoxyethylribose
  modified_base 15: mod_base = m5c; mod_base = OTHER; note = sugar modification: 2'-O-methoxyethylribose; note = backbone modification: 5'-phosphorothioate
  modified_base 16: mod_base = OTHER; note = thymine; note = sugar modification: 2'-O-methoxyethylribose; note = backbone modification: 5'-phosphorothioate
  modified_base 17: mod_base = OTHER; note = backbone modification: 5'-phosphorothioate; note = sugar modification: 2'-O-methoxyethylribose
  modified_base 18: mod_base = OTHER; note = sugar modification: lna
ctgaattctttcaactag

SEQ ID NO: 1261 - RNA, 15 nt, synthetic construct
  source 1..15: mol_type = other RNA; note = Antisense oligonucleotide
  modified_base 1: mod_base = OTHER; note = sugar modification: 2'-O-methoxyethylribose; note = backbone modification: 5'-phosphorothioate
  modified_base 2: mod_base = OTHER; note = backbone modification: 5'-phosphorothioate; note = sugar modification: 2'-O-methoxyethylribose
  modified_base 3: mod_base = OTHER; note = sugar modification: 2'-O-methoxyethylribose; note = backbone modification: 5'-phosphorothioate; note = thymine
  modified_base 4: mod_base = OTHER; note = thymine; note = backbone modification: 5'-phosphorothioate; note = sugar modification: 2'-O-methoxyethylribose
  modified_base 5: mod_base = OTHER; mod_base = m5c; note = sugar modification: 2'-O-methoxyethylribose; note = backbone modification: 5'-phosphorothioate
  modified_base 6: mod_base = OTHER; note = sugar modification: 2'-O-methoxyethylribose; note = backbone modification: 5'-phosphorothioate; note = thymine
  modified_base 7: mod_base = OTHER; note = sugar modification: 2'-O-methoxyethylribose; note = thymine; note = backbone modification: 5'-phosphorothioate
  modified_base 8: mod_base = OTHER; note = sugar modification: 2'-O-methoxyethylribose; note = thymine; note = backbone modification: 5'-phosphorothioate
  modified_base 9: mod_base = m5c; mod_base = OTHER; note = backbone modification: 5'-phosphorothioate; note = sugar modification: 2'-O-methoxyethylribose
  modified_base 10: mod_base = OTHER; note = sugar modification: 2'-O-methoxyethylribose; note = backbone modification: 5'-phosphorothioate
  modified_base 11: mod_base = OTHER; note = backbone modification: 5'-phosphorothioate; note = sugar modification: 2'-O-methoxyethylribose
  modified_base 12: mod_base = OTHER; note = backbone modification: 5'-phosphorothioate
  modified_base 13: mod_base = OTHER; note = backbone modification: 5'-phosphorothioate
  modified_base 14: mod_base = OTHER; note = backbone modification: 5'-phosphorothioate
aattctttcaactag

SEQ ID NO: 1262 - RNA, 15 nt, synthetic construct
  source 1..15: mol_type = other RNA; note = Antisense oligonucleotide
  modified_base 1: mod_base = OTHER; note = sugar modification: lna; note = backbone modification: 5'-phosphorothioate
  modified_base 2: mod_base = OTHER; note = backbone modification: 5'-phosphorothioate; note = sugar modification: 2'-O-methoxyethylribose
  modified_base 3: mod_base = OTHER; note = backbone modification: 5'-phosphorothioate; note = thymine; note = sugar modification: 2'-O-methoxyethylribose
  modified_base 4: mod_base = OTHER; note = thymine; note = sugar modification: 2'-O-methoxyethylribose; note = backbone modification: 5'-phosphorothioate
  modified_base 5: mod_base = OTHER; mod_base = m5c; note = sugar modification: 2'-O-methoxyethylribose; note = backbone modification: 5'-phosphorothioate
  modified_base 6: mod_base = OTHER; note = backbone modification: 5'-phosphorothioate; note = sugar modification: 2'-O-methoxyethylribose; note = thymine
  modified_base 7: mod_base = OTHER; note = backbone modification: 5'-phosphorothioate; note = sugar modification: 2'-O-methoxyethylribose; note = thymine
  modified_base 8: mod_base = OTHER; note = backbone modification: 5'-phosphorothioate; note = thymine; note = sugar modification: 2'-O-methoxyethylribose
  modified_base 9: mod_base = m5c; mod_base = OTHER; note = sugar modification: 2'-O-methoxyethylribose; note = backbone modification: 5'-phosphorothioate
  modified_base 10: mod_base = OTHER; note = backbone modification: 5'-phosphorothioate; note = sugar modification: 2'-O-methoxyethylribose
  modified_base 11: mod_base = OTHER; note = backbone modification: 5'-phosphorothioate; note = sugar modification: 2'-O-methoxyethylribose
  modified_base 12: mod_base = OTHER; note = backbone modification: 5'-phosphorothioate
  modified_base 13: mod_base = OTHER; note = backbone modification: 5'-phosphorothioate
  modified_base 14: mod_base = OTHER; note = backbone modification: 5'-phosphorothioate
  modified_base 15: mod_base = OTHER; note = sugar modification: lna
aattctttcaactag

SEQ ID NO: 1263 - RNA, 15 nt, synthetic construct
  source 1..15: mol_type = other RNA; note = Antisense oligonucleotide
  modified_base 1: mod_base = OTHER; note = backbone modification: 5'-phosphorothioate; note = sugar modification: lna
  modified_base 2: mod_base = OTHER; note = sugar modification: 2'-O-methoxyethylribose; note = backbone modification: 5'-phosphorothioate
  modified_base 3: mod_base = OTHER; note = thymine; note = sugar modification: 2'-O-methoxyethylribose; note = backbone modification: 5'-phosphorothioate
  modified_base 4: mod_base = OTHER; note = sugar modification: 2'-O-methoxyethylribose; note = thymine; note = backbone modification: 5'-phosphorothioate
  modified_base 5: mod_base = m5c; mod_base = OTHER; note = backbone modification: 5'-phosphorothioate; note = sugar modification: 2'-O-methoxyethylribose
  modified_base 6: mod_base = OTHER; note = sugar modification: 2'-O-methoxyethylribose; note = thymine; note = backbone modification: 5'-phosphorothioate
  modified_base 7: mod_base = OTHER; note = thymine; note = sugar modification: 2'-O-methoxyethylribose; note = backbone modification: 5'-phosphorothioate
  modified_base 8: mod_base = OTHER; note = sugar modification: 2'-O-methoxyethylribose; note = thymine; note = backbone modification: 5'-phosphorothioate
  modified_base 9: mod_base = OTHER; mod_base = m5c; note = sugar modification: 2'-O-methoxyethylribose; note = backbone modification: 5'-phosphorothioate
  modified_base 10: mod_base = OTHER; note = sugar modification: 2'-O-methoxyethylribose; note = backbone modification: 5'-phosphorothioate
  modified_base 11: mod_base = OTHER; note = backbone modification: 5'-phosphorothioate; note = sugar modification: 2'-O-methoxyethylribose
  modified_base 12: mod_base = OTHER; note = backbone modification: 5'-phosphorothioate
  modified_base 13: mod_base = OTHER; note = backbone modification: 5'-phosphorothioate
  modified_base 14: mod_base = OTHER; note = backbone modification: 5'-phosphorothioate; note = sugar modification: 2'-O-methoxyethylribose
  modified_base 15: mod_base = OTHER; note = sugar modification: lna
aattctttcaactag

SEQ ID NO: 1264 - RNA, 15 nt, synthetic construct
  source 1..15: mol_type = other RNA; note = Antisense oligonucleotide
  modified_base 1: mod_base = OTHER; note = sugar modification: lna; note = backbone modification: 5'-phosphorothioate
  modified_base 2: mod_base = OTHER; note = sugar modification: 2'-O-methoxyethylribose; note = backbone modification: 5'-phosphorothioate
  modified_base 3: mod_base = OTHER; note = sugar modification: 2'-O-methoxyethylribose; note = thymine; note = backbone modification: 5'-phosphorothioate
  modified_base 4: mod_base = OTHER; note = thymine; note = backbone modification: 5'-phosphorothioate; note = sugar modification: 2'-O-methoxyethylribose
  modified_base 5: mod_base = m5c; mod_base = OTHER; note = sugar modification: 2'-O-methoxyethylribose; note = backbone modification: 5'-phosphorothioate
  modified_base 6: mod_base = OTHER; note = thymine; note = backbone modification: 5'-phosphorothioate; note = sugar modification: 2'-O-methoxyethylribose
  modified_base 7: mod_base = OTHER; note = sugar modification: 2'-O-methoxyethylribose; note = backbone modification: 5'-phosphorothioate; note = thymine
  modified_base 8: mod_base = OTHER; note = sugar modification: 2'-O-methoxyethylribose; note = backbone modification: 5'-phosphorothioate; note = thymine
  modified_base 9: mod_base = m5c; mod_base = OTHER; note = backbone modification: 5'-phosphorothioate; note = sugar modification: 2'-O-methoxyethylribose
  modified_base 10: mod_base = OTHER; note = sugar modification: 2'-O-methoxyethylribose; note = backbone modification: 5'-phosphorothioate
  modified_base 11: mod_base = OTHER; note = backbone modification: 5'-phosphorothioate; note = sugar modification: 2'-O-methoxyethylribose
  modified_base 12: mod_base = OTHER; note = backbone modification: 5'-phosphorothioate
  modified_base 13: mod_base = OTHER; note = backbone modification: 5'-phosphorothioate
  modified_base 14: mod_base = OTHER; note = backbone modification: 5'-phosphorothioate; note = sugar modification: lna
  modified_base 15: mod_base = OTHER; note = sugar modification: lna
aattctttcaactag

SEQ ID NO: 1265 - RNA, 15 nt, synthetic construct
  source 1..15: mol_type = other RNA; note = Antisense oligonucleotide
  modified_base 1: mod_base = OTHER; note = sugar modification: lna; note = backbone modification: 5'-phosphorothioate
  modified_base 2: mod_base = OTHER; note = sugar modification: 2'-O-methoxyethylribose; note = backbone modification: 5'-phosphorothioate
  modified_base 3: mod_base = OTHER; note = backbone modification: 5'-phosphorothioate; note = sugar modification: 2'-O-methoxyethylribose; note = thymine
  modified_base 4: mod_base = OTHER; note = sugar modification: 2'-O-methoxyethylribose; note = backbone modification: 5'-phosphorothioate; note = thymine
  modified_base 5: mod_base = m5c; mod_base = OTHER; note = backbone modification: 5'-phosphorothioate; note = sugar modification: 2'-O-methoxyethylribose
  modified_base 6: mod_base = OTHER; note = backbone modification: 5'-phosphorothioate; note = thymine; note = sugar modification: 2'-O-methoxyethylribose
  modified_base 7: mod_base = OTHER; note = sugar modification: 2'-O-methoxyethylribose; note = backbone modification: 5'-phosphorothioate; note = thymine
  modified_base 8: mod_base = OTHER; note = thymine; note = backbone modification: 5'-phosphorothioate; note = sugar modification: 2'-O-methoxyethylribose
  modified_base 9: mod_base = OTHER; mod_base = m5c; note = backbone modification: 5'-phosphorothioate; note = sugar modification: 2'-O-methoxyethylribose
  modified_base 10: mod_base = OTHER; note = backbone modification: 5'-phosphorothioate; note = sugar modification: 2'-O-methoxyethylribose
  modified_base 11: mod_base = OTHER; note = backbone modification: 5'-phosphorothioate; note = sugar modification: 2'-O-methoxyethylribose
  modified_base 12: mod_base = OTHER; note = backbone modification: 5'-phosphorothioate
  modified_base 13: mod_base = OTHER; note = sugar modification: 2'-O-methoxyethylribose; note = thymine; note = backbone modification: 5'-phosphorothioate
  modified_base 14: mod_base = OTHER; note = backbone modification: 5'-phosphorothioate; note = sugar modification: 2'-O-methoxyethylribose
  modified_base 15: mod_base = OTHER; note = sugar modification: lna
aattctttcaactag

SEQ ID NO: 1266 - RNA, 15 nt, synthetic construct
  source 1..15: mol_type = other RNA; note = Antisense oligonucleotide
  modified_base 1: mod_base = OTHER; note = backbone modification: 5'-phosphorothioate; note = sugar modification: 2'-O-methoxyethylribose
  modified_base 2: mod_base = OTHER; note = sugar modification: 2'-O-methoxyethylribose; note = backbone modification: 5'-phosphorothioate
  modified_base 3: mod_base = OTHER; note = thymine; note = backbone modification: 5'-phosphorothioate; note = sugar modification: 2'-O-methoxyethylribose
  modified_base 4: mod_base = OTHER; note = thymine; note = sugar modification: 2'-O-methoxyethylribose; note = backbone modification: 5'-phosphorothioate
  modified_base 5: mod_base = OTHER; mod_base = m5c; note = backbone modification: 5'-phosphorothioate; note = sugar modification: 2'-O-methoxyethylribose
  modified_base 6: mod_base = OTHER; note = thymine; note = backbone modification: 5'-phosphorothioate; note = sugar modification: 2'-O-methoxyethylribose
  modified_base 7: mod_base = OTHER; note = thymine; note = backbone modification: 5'-phosphorothioate; note = sugar modification: 2'-O-methoxyethylribose
  modified_base 8: mod_base = OTHER; note = sugar modification: 2'-O-methoxyethylribose; note = backbone modification: 5'-phosphorothioate; note = thymine
  modified_base 9: mod_base = m5c; mod_base = OTHER; note = backbone modification: 5'-phosphorothioate; note = sugar modification: 2'-O-methoxyethylribose
  modified_base 10: mod_base = OTHER; note = backbone modification: 5'-phosphorothioate; note = sugar modification: 2'-O-methoxyethylribose
  modified_base 11: mod_base = OTHER; note = backbone modification: 5'-phosphorothioate; note = sugar modification: 2'-O-methoxyethylribose
  modified_base 12: mod_base = OTHER; mod_base = m5c; note = backbone modification: 5'-phosphorothioate; note = sugar modification: lna
  modified_base 13: mod_base = OTHER; note = thymine; note = backbone modification: 5'-phosphorothioate; note = sugar modification: lna
  modified_base 14: mod_base = OTHER; note = backbone modification: 5'-phosphorothioate; note = sugar modification: lna
  modified_base 15: mod_base = OTHER; note = sugar modification: lna
aattctttcaactag

SEQ ID NO: 1267 - RNA, 15 nt, synthetic construct
  source 1..15: mol_type = other RNA; note = Antisense oligonucleotide
  modified_base 1: mod_base = OTHER; note = backbone modification: 5'-phosphorothioate; note = sugar modification: 2'-O-methoxyethylribose
  modified_base 2: mod_base = OTHER; note = sugar modification: 2'-O-methoxyethylribose; note = backbone modification: 5'-phosphorothioate
  modified_base 3: mod_base = OTHER; note = backbone modification: 5'-phosphorothioate; note = sugar modification: 2'-O-methoxyethylribose; note = thymine
  modified_base 4: mod_base = OTHER; note = thymine; note = sugar modification: 2'-O-methoxyethylribose; note = backbone modification: 5'-phosphorothioate
  modified_base 5: mod_base = OTHER; mod_base = m5c; note = backbone modification: 5'-phosphorothioate; note = sugar modification: 2'-O-methoxyethylribose
  modified_base 6: mod_base = OTHER; note = backbone modification: 5'-phosphorothioate; note = thymine; note = sugar modification: 2'-O-methoxyethylribose
  modified_base 7: mod_base = OTHER; note = sugar modification: 2'-O-methoxyethylribose; note = backbone modification: 5'-phosphorothioate; note = thymine
  modified_base 8: mod_base = OTHER; note = sugar modification: 2'-O-methoxyethylribose; note = thymine; note = backbone modification: 5'-phosphorothioate
  modified_base 9: mod_base = OTHER; mod_base = m5c; note = backbone modification: 5'-phosphorothioate; note = sugar modification: 2'-O-methoxyethylribose
  modified_base 10: mod_base = OTHER; note = backbone modification: 5'-phosphorothioate; note = sugar modification: 2'-O-methoxyethylribose
  modified_base 11: mod_base = OTHER; note = sugar modification: 2'-O-methoxyethylribose; note = backbone modification: 5'-phosphorothioate
  modified_base 12: mod_base = OTHER; mod_base = m5c; note = backbone modification: 5'-phosphorothioate; note = sugar modification: lna
  modified_base 13: mod_base = OTHER; note = thymine; note = sugar modification: lna; note = backbone modification: 5'-phosphorothioate
  modified_base 14: mod_base = OTHER; note = sugar modification: 2'-O-methoxyethylribose; note = backbone modification: 5'-phosphorothioate
  modified_base 15: mod_base = OTHER; note = sugar modification: 2'-O-methoxyethylribose
aattctttcaactag

SEQ ID NO: 1268 - RNA, 15 nt, synthetic construct
  source 1..15: mol_type = other RNA; note = Antisense oligonucleotide
  modified_base 1: mod_base = OTHER; note = backbone modification: 5'-phosphorothioate; note = sugar modification: lna
  modified_base 2: mod_base = OTHER; note = backbone modification: 5'-phosphorothioate; note = sugar modification: 2'-O-methoxyethylribose
  modified_base 3: mod_base = OTHER; note = sugar modification: 2'-O-methoxyethylribose; note = backbone modification: 5'-phosphorothioate; note = thymine
  modified_base 4: mod_base = OTHER; note = sugar modification: 2'-O-methoxyethylribose; note = thymine; note = backbone modification: 5'-phosphorothioate
  modified_base 5: mod_base = OTHER; mod_base = m5c; note = sugar modification: 2'-O-methoxyethylribose; note = backbone modification: 5'-phosphorothioate
  modified_base 6: mod_base = OTHER; note = sugar modification: 2'-O-methoxyethylribose; note = thymine; note = backbone modification: 5'-phosphorothioate
  modified_base 7: mod_base = OTHER; note = thymine; note = sugar modification: 2'-O-methoxyethylribose; note = backbone modification: 5'-phosphorothioate
  modified_base 8: mod_base = OTHER; note = thymine; note = sugar modification: 2'-O-methoxyethylribose; note = backbone modification: 5'-phosphorothioate
  modified_base 9: mod_base = m5c; mod_base = OTHER; note = backbone modification: 5'-phosphorothioate; note = sugar modification: 2'-O-methoxyethylribose
  modified_base 10: mod_base = OTHER; note = sugar modification: 2'-O-methoxyethylribose; note = backbone modification: 5'-phosphorothioate
  modified_base 11: mod_base = OTHER; note = sugar modification: 2'-O-methoxyethylribose; note = backbone modification: 5'-phosphorothioate
  modified_base 12: mod_base = OTHER; mod_base = m5c; note = sugar modification: lna; note = backbone modification: 5'-phosphorothioate
  modified_base 13: mod_base = OTHER; note = thymine; note = backbone modification: 5'-phosphorothioate; note = sugar modification: lna
  modified_base 14: mod_base = OTHER; note = backbone modification: 5'-phosphorothioate; note = sugar modification: 2'-O-methoxyethylribose
  modified_base 15: mod_base = OTHER; note = sugar modification: lna
aattctttcaactag

SEQ ID NO: 1269 - RNA, 15 nt, synthetic construct
  source 1..15: mol_type = other RNA; note = Antisense oligonucleotide
  modified_base 1: mod_base = OTHER; note = backbone modification: 5'-phosphorothioate; note = sugar modification: lna
  modified_base 2: mod_base = OTHER; note = sugar modification: 2'-O-methoxyethylribose; note = backbone modification: 5'-phosphorothioate
  modified_base 3: mod_base = OTHER; note = thymine; note = backbone modification: 5'-phosphorothioate; note = sugar modification: 2'-O-methoxyethylribose
  modified_base 4: mod_base = OTHER; note = thymine; note = backbone modification: 5'-phosphorothioate; note = sugar modification: 2'-O-methoxyethylribose
  modified_base 5: mod_base = m5c; mod_base = OTHER; note = sugar modification: 2'-O-methoxyethylribose; note = backbone modification: 5'-phosphorothioate
  modified_base 6: mod_base = OTHER; note = sugar modification: 2'-O-methoxyethylribose; note = backbone modification: 5'-phosphorothioate; note = thymine
  modified_base 7: mod_base = OTHER; note = thymine; note = sugar modification: 2'-O-methoxyethylribose; note = backbone modification: 5'-phosphorothioate
  modified_base 8: mod_base = OTHER; note = sugar modification: 2'-O-methoxyethylribose; note = backbone modification: 5'-phosphorothioate; note = thymine
  modified_base 9: mod_base = OTHER; mod_base = m5c; note = backbone modification: 5'-phosphorothioate; note = sugar modification: 2'-O-methoxyethylribose
  modified_base 10: mod_base = OTHER; note = backbone modification: 5'-phosphorothioate; note = sugar modification: 2'-O-methoxyethylribose
  modified_base 11: mod_base = OTHER; note = sugar modification: 2'-O-methoxyethylribose; note = backbone modification: 5'-phosphorothioate
  modified_base 12: mod_base = OTHER; mod_base = m5c; note = backbone modification: 5'-phosphorothioate; note = sugar modification: lna
  modified_base 13: mod_base = OTHER; note = sugar modification: 2'-O-methoxyethylribose; note = backbone modification: 5'-phosphorothioate; note = thymine
  modified_base 14: mod_base = OTHER; note = sugar modification: 2'-O-methoxyethylribose; note = backbone modification: 5'-phosphorothioate
  modified_base 15: mod_base = OTHER; note = sugar modification: lna
aattctttcaactag

SEQ ID NO: 1270 - RNA, 15 nt, synthetic construct
  source 1..15: mol_type = other RNA; note = Antisense oligonucleotide
  modified_base 1: mod_base = OTHER; note = backbone modification: 5'-phosphorothioate; note = sugar modification: 2'-O-methoxyethylribose
  modified_base 2: mod_base = OTHER; note = backbone modification: 5'-phosphorothioate
  modified_base 3: mod_base = OTHER; note = backbone modification: 5'-phosphorothioate
  modified_base 4: mod_base = OTHER; note = backbone modification: 5'-phosphorothioate
  modified_base 5: mod_base = OTHER; note = backbone modification: 5'-phosphorothioate
  modified_base 6: mod_base = OTHER; note = backbone modification: 5'-phosphorothioate
  modified_base 7: mod_base = OTHER; note = backbone modification: 5'-phosphorothioate
  modified_base 8: mod_base = OTHER; note = backbone modification: 5'-phosphorothioate
  modified_base 9: mod_base = OTHER; note = backbone modification: 5'-phosphorothioate
  modified_base 10: mod_base = OTHER; note = backbone modification: 5'-phosphorothioate
  modified_base 11: mod_base = OTHER; note = backbone modification: 5'-phosphorothioate
  modified_base 12: mod_base = OTHER; note = backbone modification: 5'-phosphorothioate
  modified_base 13: mod_base = OTHER; note = backbone modification: 5'-phosphorothioate
  modified_base 14: mod_base = OTHER; note = backbone modification: 5'-phosphorothioate
  modified_base 15: mod_base = OTHER; note = sugar modification: 2'-O-methoxyethylribose
aattctttcaactag

SEQ ID NO: 1271 - RNA, 15 nt, synthetic construct
  source 1..15: mol_type = other RNA; note = Antisense oligonucleotide
  modified_base 1: mod_base = OTHER; note = backbone modification: 5'-phosphorothioate; note = sugar modification: lna
  modified_base 2: mod_base = OTHER; note = backbone modification: 5'-phosphorothioate
  modified_base 3: mod_base = OTHER; note = backbone modification: 5'-phosphorothioate
  modified_base 4: mod_base = OTHER; note = backbone modification: 5'-phosphorothioate
  modified_base 5: mod_base = OTHER; note = backbone modification: 5'-phosphorothioate
  modified_base 6: mod_base = OTHER; note = backbone modification: 5'-phosphorothioate
  modified_base 7: mod_base = OTHER; note = backbone modification: 5'-phosphorothioate
  modified_base 8: mod_base = OTHER; note = backbone modification: 5'-phosphorothioate
  modified_base 9: mod_base = OTHER; note = backbone modification: 5'-phosphorothioate
  modified_base 10: mod_base = OTHER; note = backbone modification: 5'-phosphorothioate
  modified_base 11: mod_base = OTHER; note = backbone modification: 5'-phosphorothioate
  modified_base 12: mod_base = OTHER; note = backbone modification: 5'-phosphorothioate
  modified_base 13: mod_base = OTHER; note = backbone modification: 5'-phosphorothioate
  modified_base 14: mod_base = OTHER; note = backbone modification: 5'-phosphorothioate
  modified_base 15: mod_base = OTHER; note = sugar modification: lna
aattctttcaactag

SEQ ID NO: 1272 - RNA, 15 nt, synthetic construct
  source 1..15: mol_type = other RNA; note = Antisense oligonucleotide
  modified_base 1: mod_base = OTHER; note = sugar modification: lna; note = backbone modification: 5'-phosphorothioate
  modified_base 2: mod_base = OTHER; note = backbone modification: 5'-phosphorothioate; note = sugar modification: lna
  modified_base 3: mod_base = OTHER; note = backbone modification: 5'-phosphorothioate
  modified_base 4: mod_base = OTHER; note = backbone modification: 5'-phosphorothioate
  modified_base 5: mod_base = OTHER; note = backbone modification: 5'-phosphorothioate
  modified_base 6: mod_base = OTHER; note = backbone modification: 5'-phosphorothioate
  modified_base 7: mod_base = OTHER; note = backbone modification: 5'-phosphorothioate
  modified_base 8: mod_base = OTHER; note = backbone modification: 5'-phosphorothioate
  modified_base 9: mod_base = OTHER; note = backbone modification: 5'-phosphorothioate
  modified_base 10: mod_base = OTHER; note = backbone modification: 5'-phosphorothioate
  modified_base 11: mod_base = OTHER; note = backbone modification: 5'-phosphorothioate
  modified_base 12: mod_base = OTHER; note = backbone modification: 5'-phosphorothioate
  modified_base 13: mod_base = OTHER; note = backbone modification: 5'-phosphorothioate
  modified_base 14: mod_base = OTHER; note = sugar modification: lna; note = backbone modification: 5'-phosphorothioate
  modified_base 15: mod_base = OTHER; note = sugar modification: lna
aattctttcaactag

SEQ ID NO: 1273 - RNA, 15 nt, synthetic construct
  source 1..15: mol_type = other RNA; note = Antisense oligonucleotide
  modified_base 1: mod_base = OTHER; note = sugar modification: lna; note = backbone modification: 5'-phosphorothioate
  modified_base 2: mod_base = OTHER; note = sugar modification: lna; note = backbone modification: 5'-phosphorothioate
  modified_base 3: mod_base = OTHER; note = backbone modification: 5'-phosphorothioate
  modified_base 4: mod_base = OTHER; note = backbone modification: 5'-phosphorothioate
  modified_base 5: mod_base = OTHER; note = backbone modification: 5'-phosphorothioate
  modified_base 6: mod_base = OTHER; note = backbone modification: 5'-phosphorothioate
  modified_base 7: mod_base = OTHER; note = backbone modification: 5'-phosphorothioate
  modified_base 8: mod_base = OTHER; note = backbone modification: 5'-phosphorothioate
  modified_base 9: mod_base = OTHER; note = backbone modification: 5'-phosphorothioate
  modified_base 10: mod_base = OTHER; note = backbone modification: 5'-phosphorothioate
  modified_base 11: mod_base = OTHER; note = backbone modification: 5'-phosphorothioate
  modified_base 12: mod_base = OTHER; note = backbone modification: 5'-phosphorothioate
  modified_base 13: mod_base = OTHER; note = backbone modification: 5'-phosphorothioate
  modified_base 14: mod_base = OTHER; note = backbone modification: 5'-phosphorothioate
  modified_base 15: mod_base = OTHER; note = sugar modification: lna
aattctttcaactag

SEQ ID NO: 1274 - RNA, 15 nt, synthetic construct
  source 1..15: mol_type = other RNA; note = Antisense oligonucleotide
  modified_base 1: mod_base = OTHER; note = backbone modification: 5'-phosphorothioate; note = sugar modification: lna
  modified_base 2: mod_base = OTHER; note = backbone modification: 5'-phosphorothioate
  modified_base 3: mod_base = OTHER; note = backbone modification: 5'-phosphorothioate
  modified_base 4: mod_base = OTHER; note = backbone modification: 5'-phosphorothioate
  modified_base 5: mod_base = OTHER; note = backbone modification: 5'-phosphorothioate
  modified_base 6: mod_base = OTHER; note = backbone modification: 5'-phosphorothioate
  modified_base 7: mod_base = OTHER; note = backbone modification: 5'-phosphorothioate
  modified_base 8: mod_base = OTHER; note = backbone modification: 5'-phosphorothioate
  modified_base 9: mod_base = OTHER; note = backbone modification: 5'-phosphorothioate
  modified_base 10: mod_base = OTHER; note = backbone modification: 5'-phosphorothioate
  modified_base 11: mod_base = OTHER; note = backbone modification: 5'-phosphorothioate
  modified_base 12: mod_base = OTHER; note = backbone modification: 5'-phosphorothioate
  modified_base 13: mod_base = OTHER; note = backbone modification: 5'-phosphorothioate
  modified_base 14: mod_base = OTHER; note = backbone modification: 5'-phosphorothioate; note = sugar modification: lna
  modified_base 15: mod_base = OTHER; note = sugar modification: lna
aattctttcaactag

SEQ ID NO: 1275 - RNA, 15 nt, synthetic construct
  source 1..15: mol_type = other RNA; note = Antisense oligonucleotide
  modified_base 1: mod_base = OTHER; note = backbone modification: 5'-phosphorothioate; note = sugar modification: lna
  modified_base 2: mod_base = OTHER; note = sugar modification: lna; note = backbone modification: 5'-phosphorothioate
  modified_base 3: mod_base = OTHER; note = sugar modification: lna; note = backbone modification: 5'-phosphorothioate; note = thymine
  modified_base 4: mod_base = OTHER; note = backbone modification: 5'-phosphorothioate
  modified_base 5: mod_base = OTHER; note = backbone modification: 5'-phosphorothioate
  modified_base 6: mod_base = OTHER; note = backbone modification: 5'-phosphorothioate
  modified_base 7: mod_base = OTHER; note = backbone modification: 5'-phosphorothioate
  modified_base 8: mod_base = OTHER; note = backbone modification: 5'-phosphorothioate
  modified_base 9: mod_base = OTHER; note = backbone modification: 5'-phosphorothioate
  modified_base 10: mod_base = OTHER; note = backbone modification: 5'-phosphorothioate
  modified_base 11: mod_base = OTHER; note = backbone modification: 5'-phosphorothioate
  modified_base 12: mod_base = OTHER; note = backbone modification: 5'-phosphorothioate
  modified_base 13: mod_base = OTHER; note = backbone modification: 5'-phosphorothioate
  modified_base 14: mod_base = OTHER; note = backbone modification: 5'-phosphorothioate; note = sugar modification: lna
  modified_base 15: mod_base = OTHER; note = sugar modification: lna
aattctttcaactag

SEQ ID NO: 1276 - RNA, 15 nt, synthetic construct
  source 1..15: mol_type = other RNA; note = Antisense oligonucleotide
  modified_base 1: mod_base = OTHER; note = sugar modification: lna; note = backbone modification: 5'-phosphorothioate
  modified_base 2: mod_base = OTHER; note = backbone modification: 5'-phosphorothioate; note = sugar modification: lna
  modified_base 3: mod_base = OTHER; note = backbone modification: 5'-phosphorothioate
  modified_base 4: mod_base = OTHER; note = backbone modification: 5'-phosphorothioate
  modified_base 5: mod_base = OTHER; note = backbone modification: 5'-phosphorothioate
  modified_base 6: mod_base = OTHER; note = backbone modification: 5'-phosphorothioate
  modified_base 7: mod_base = OTHER; note = backbone modification: 5'-phosphorothioate
  modified_base 8: mod_base = OTHER; note = backbone modification: 5'-phosphorothioate
  modified_base 9: mod_base = OTHER; note = backbone modification: 5'-phosphorothioate
  modified_base 10: mod_base = OTHER; note = backbone modification: 5'-phosphorothioate
  modified_base 11: mod_base = OTHER; note = backbone modification: 5'-phosphorothioate
  modified_base 12: mod_base = OTHER; note = backbone modification: 5'-phosphorothioate
  modified_base 13: mod_base = OTHER; note = sugar modification: lna; note = thymine; note = backbone modification: 5'-phosphorothioate
  modified_base 14: mod_base = OTHER; note = backbone modification: 5'-phosphorothioate; note = sugar modification: lna
  modified_base 15: mod_base = OTHER; note = sugar modification: lna
aattctttcaactag

SEQ ID NO: 1277 - RNA, 15 nt, synthetic construct
  source 1..15: mol_type = other RNA; note = Antisense oligonucleotide
  modified_base 1: mod_base = OTHER; note = backbone modification: 5'-phosphorothioate; note = sugar modification: lna
  modified_base 2: mod_base = OTHER; note = backbone modification: 5'-phosphorothioate
  modified_base 3: mod_base = OTHER; note = backbone modification: 5'-phosphorothioate
  modified_base 4: mod_base = OTHER; note = backbone modification: 5'-phosphorothioate
  modified_base 5: mod_base = OTHER; note = backbone modification: 5'-phosphorothioate
  modified_base 6: mod_base = OTHER; note = backbone modification: 5'-phosphorothioate
  modified_base 7: mod_base = OTHER; note = backbone modification: 5'-phosphorothioate
  modified_base 8: mod_base = OTHER; note = backbone modification: 5'-phosphorothioate
  modified_base 9: mod_base = OTHER; mod_base = m5c; note = backbone modification: 5'-phosphorothioate; note = sugar modification: lna
  modified_base 10: mod_base = OTHER; note = backbone modification: 5'-phosphorothioate
  modified_base 11: mod_base = OTHER; note = backbone modification: 5'-phosphorothioate
  modified_base 12: mod_base = OTHER; note = backbone modification: 5'-phosphorothioate
  modified_base 13: mod_base = OTHER; note = backbone modification: 5'-phosphorothioate
  modified_base 14: mod_base = OTHER; note = sugar modification: lna; note = backbone modification: 5'-phosphorothioate
  modified_base 15: mod_base = OTHER; note = sugar modification: lna
aattctttcaactag

SEQ ID NO: 1278 - RNA, 15 nt, synthetic construct
  source 1..15: mol_type = other RNA; note = Antisense oligonucleotide
  modified_base 1: mod_base = OTHER; note = sugar modification: lna; note = backbone modification: 5'-phosphorothioate
  modified_base 2: mod_base = OTHER; note = backbone modification: 5'-phosphorothioate
  modified_base 3: mod_base = OTHER; note = backbone modification: 5'-phosphorothioate
  modified_base 4: mod_base = OTHER; note = backbone modification: 5'-phosphorothioate
  modified_base 5: mod_base = OTHER; mod_base = m5c; note = sugar modification: lna; note = backbone modification: 5'-phosphorothioate
  modified_base 6: mod_base = OTHER; note = backbone modification: 5'-phosphorothioate
  modified_base 7: mod_base = OTHER; note = backbone modification: 5'-phosphorothioate
  modified_base 8: mod_base = OTHER; note = backbone modification: 5'-phosphorothioate
  modified_base 9: mod_base = OTHER; note = backbone modification: 5'-phosphorothioate
  modified_base 10: mod_base = OTHER; note = backbone modification: 5'-phosphorothioate
  modified_base 11: mod_base = OTHER; note = backbone modification: 5'-phosphorothioate
  modified_base 12: mod_base = OTHER; note = backbone modification: 5'-phosphorothioate
  modified_base 13: mod_base = OTHER; note = backbone modification: 5'-phosphorothioate
  modified_base 14: mod_base = OTHER; note = sugar modification: lna; note = backbone modification: 5'-phosphorothioate
  modified_base 15: mod_base = OTHER; note = sugar modification: lna
aattctttcaactag

SEQ ID NO: 1279 - RNA, 18 nt, synthetic construct
  source 1..18: mol_type = other RNA; note = Antisense oligonucleotide
  modified_base 1: mod_base = OTHER; note = sugar modification: 2-fluororibose; note = backbone modification: 5'-phosphorothioate
  modified_base 2: mod_base = OTHER; note = backbone modification: 5'-phosphorothioate; note = sugar modification: 2'-O-methoxyethylribose; note = thymine
  modified_base 3: mod_base = OTHER; note = backbone modification: 5'-phosphorothioate; note = sugar modification: 2'-O-methoxyethylribose
  modified_base 4: mod_base = OTHER; note = sugar modification: 2'-O-methoxyethylribose; note = backbone modification: 5'-phosphorothioate
  modified_base 5: mod_base = OTHER; note = sugar modification: 2'-O-methoxyethylribose; note = backbone modification: 5'-phosphorothioate
  modified_base 6: mod_base = OTHER; note = sugar modification: 2'-O-methoxyethylribose; note = backbone modification: 5'-phosphorothioate; note = thymine
  modified_base 7: mod_base = OTHER; note = backbone modification: 5'-phosphorothioate; note = sugar modification: 2'-O-methoxyethylribose; note = thymine
  modified_base 8: mod_base = m5c; mod_base = OTHER; note = sugar modification: 2'-O-methoxyethylribose; note = backbone modification: 5'-phosphorothioate
  modified_base 9: mod_base = OTHER; note = backbone modification: 5'-phosphorothioate; note = sugar modification: 2'-O-methoxyethylribose; note = thymine
  modified_base 10: mod_base = OTHER; note = sugar modification: 2'-O-methoxyethylribose; note = thymine; note = backbone modification: 5'-phosphorothioate
  modified_base 11: mod_base = OTHER; note = thymine; note = sugar modification: 2'-O-methoxyethylribose; note = backbone modification: 5'-phosphorothioate
  modified_base 12: mod_base = OTHER; mod_base = m5c; note = sugar modification: 2'-O-methoxyethylribose; note = backbone modification: 5'-phosphorothioate
  modified_base 13: mod_base = OTHER; note = backbone modification: 5'-phosphorothioate; note = sugar modification: 2'-O-methoxyethylribose
  modified_base 14: mod_base = OTHER; note = backbone modification: 5'-phosphorothioate; note = sugar modification: 2'-O-methoxyethylribose
  modified_base 15: mod_base = m5c; mod_base = OTHER; note = backbone modification: 5'-phosphorothioate; note = sugar modification: 2'-O-methoxyethylribose
  modified_base 16: mod_base = OTHER; note = backbone modification: 5'-phosphorothioate; note = sugar modification: 2'-O-methoxyethylribose; note = thymine
  modified_base 17: mod_base = OTHER; note = sugar modification: 2'-O-methoxyethylribose; note = backbone modification: 5'-phosphorothioate
  modified_base 18: mod_base = OTHER; note = sugar modification: 2-fluororibose
ctgaattctttcaactag

SEQ ID NO: 1280 - RNA, 18 nt, synthetic construct
  source 1..18: mol_type = other RNA; note = Antisense oligonucleotide
  modified_base 1: mod_base = OTHER; note = sugar modification: 2-fluororibose; note = backbone modification: 5'-phosphorothioate
  modified_base 2: mod_base = OTHER; note = sugar modification: 2-fluororibose; note = backbone modification: 5'-phosphorothioate
  modified_base 3: mod_base = OTHER; note = backbone modification: 5'-phosphorothioate; note = sugar modification: 2'-O-methoxyethylribose
  modified_base 4: mod_base = OTHER; note = sugar modification: 2'-O-methoxyethylribose; note = backbone modification: 5'-phosphorothioate
  modified_base 5: mod_base = OTHER; note = sugar modification: 2'-O-methoxyethylribose; note = backbone modification: 5'-phosphorothioate
  modified_base 6: mod_base = OTHER; note = sugar modification: 2'-O-methoxyethylribose; note = backbone modification: 5'-phosphorothioate; note = thymine
  modified_base 7: mod_base = OTHER; note = sugar modification: 2'-O-methoxyethylribose; note = backbone modification: 5'-phosphorothioate; note = thymine
  modified_base 8: mod_base = OTHER; mod_base = m5c; note = sugar modification: 2'-O-methoxyethylribose; note = backbone modification: 5'-phosphorothioate
  modified_base 9: mod_base = OTHER; note = thymine; note = backbone modification: 5'-phosphorothioate; note = sugar modification: 2'-O-methoxyethylribose
  modified_base 10: mod_base = OTHER; note = sugar modification: 2'-O-methoxyethylribose; note = thymine; note = backbone modification: 5'-phosphorothioate
  modified_base 11: mod_base = OTHER; note = thymine; note = sugar modification: 2'-O-methoxyethylribose; note = backbone modification: 5'-phosphorothioate
  modified_base 12: mod_base = OTHER; mod_base = m5c; note = sugar modification: 2'-O-methoxyethylribose; note = backbone modification: 5'-phosphorothioate
  modified_base 13: mod_base = OTHER; note = sugar modification: 2'-O-methoxyethylribose; note = backbone modification: 5'-phosphorothioate
  modified_base 14: mod_base = OTHER; note = backbone modification: 5'-phosphorothioate; note = sugar modification: 2'-O-methoxyethylribose
  modified_base 15: mod_base = m5c; mod_base = OTHER; note = sugar modification: 2'-O-methoxyethylribose; note = backbone modification: 5'-phosphorothioate
  modified_base 16: mod_base = OTHER; note = thymine; note = backbone modification: 5'-phosphorothioate; note = sugar modification: 2'-O-methoxyethylribose
  modified_base 17: mod_base = OTHER; note = backbone modification: 5'-phosphorothioate; note = sugar modification: 2-fluororibose
  modified_base 18: mod_base = OTHER; note = sugar modification: 2-fluororibose
ctgaattctttcaactag

SEQ ID NO: 1281 - RNA, 18 nt, synthetic construct
  source 1..18: mol_type = other RNA; note = Antisense oligonucleotide
  modified_base 1: mod_base = OTHER; note = backbone modification: 5'-phosphorothioate; note = sugar modification: 2-fluororibose
  modified_base 2: mod_base = OTHER; note = backbone modification: 5'-phosphorothioate; note = sugar modification: 2-fluororibose
  modified_base 3: mod_base = OTHER; note = sugar modification: 2-fluororibose; note = backbone modification: 5'-phosphorothioate
  modified_base 4: mod_base = OTHER; note = sugar modification: 2'-O-methoxyethylribose; note = backbone modification: 5'-phosphorothioate
  modified_base 5: mod_base = OTHER; note = sugar modification: 2'-O-methoxyethylribose; note = backbone modification: 5'-phosphorothioate
  modified_base 6: mod_base = OTHER; note = thymine; note = backbone modification: 5'-phosphorothioate; note = sugar modification: 2'-O-methoxyethylribose
  modified_base 7: mod_base = OTHER; note = sugar modification: 2'-O-methoxyethylribose; note = backbone modification: 5'-phosphorothioate; note = thymine
  modified_base 8: mod_base = OTHER; mod_base = m5c; note = sugar modification: 2'-O-methoxyethylribose; note = backbone modification: 5'-phosphorothioate
  modified_base 9: mod_base = OTHER; note = thymine; note = backbone modification: 5'-phosphorothioate; note = sugar modification: 2'-O-methoxyethylribose
  modified_base 10: mod_base = OTHER; note = thymine; note = backbone modification: 5'-phosphorothioate; note = sugar modification: 2'-O-methoxyethylribose
  modified_base 11: mod_base = OTHER; note = thymine; note = sugar modification: 2'-O-methoxyethylribose; note = backbone modification: 5'-phosphorothioate
  modified_base 12: mod_base = OTHER; mod_base = m5c; note = sugar modification: 2'-O-methoxyethylribose; note = backbone modification: 5'-phosphorothioate
  modified_base 13: mod_base = OTHER; note = backbone modification: 5'-phosphorothioate; note = sugar modification: 2'-O-methoxyethylribose
  modified_base 14: mod_base = OTHER; note = backbone modification: 5'-phosphorothioate; note = sugar modification: 2'-O-methoxyethylribose
  modified_base 15: mod_base = OTHER; mod_base = m5c; note = sugar modification: 2'-O-methoxyethylribose; note = backbone modification: 5'-phosphorothioate
  modified_base 16: mod_base = OTHER; note = sugar modification: 2-fluororibose; note = backbone modification: 5'-phosphorothioate
  modified_base 17: mod_base = OTHER; note = sugar modification: 2-fluororibose; note = backbone modification: 5'-phosphorothioate
  modified_base 18: mod_base = OTHER; note = sugar modification: 2-fluororibose
ctgaattctttcaactag

SEQ ID NO: 1282 - RNA, 18 nt, synthetic construct
  source 1..18: mol_type = other RNA; note = Antisense oligonucleotide
  modified_base 1: mod_base = OTHER; note = sugar modification: 2-fluororibose; note = backbone modification: 5'-phosphorothioate
  modified_base 2: mod_base = OTHER; note = sugar modification: 2-fluororibose; note = backbone modification: 5'-phosphorothioate
  modified_base 3: mod_base = OTHER; note = backbone modification: 5'-phosphorothioate; note = sugar modification: 2-fluororibose
  modified_base 4: mod_base = OTHER; note = sugar modification: 2-fluororibose; note = backbone modification: 5'-phosphorothioate
  modified_base 5: mod_base = OTHER; note = sugar modification: 2'-O-methoxyethylribose; note = backbone modification: 5'-phosphorothioate
  modified_base 6: mod_base = OTHER; note = thymine; note = sugar modification: 2'-O-methoxyethylribose; note = backbone modification: 5'-phosphorothioate
  modified_base 7: mod_base = OTHER; note = thymine; note = sugar modification: 2'-O-methoxyethylribose; note = backbone modification: 5'-phosphorothioate
  modified_base 8: mod_base = OTHER; mod_base = m5c; note = sugar modification: 2'-O-methoxyethylribose; note = backbone modification: 5'-phosphorothioate
  modified_base 9: mod_base = OTHER; note = sugar modification: 2'-O-methoxyethylribose; note = backbone modification: 5'-phosphorothioate; note = thymine
  modified_base 10: mod_base = OTHER; note = backbone modification: 5'-phosphorothioate; note = sugar modification: 2'-O-methoxyethylribose; note = thymine
  modified_base 11: mod_base = OTHER; note = sugar modification: 2'-O-methoxyethylribose; note = backbone modification: 5'-phosphorothioate; note = thymine
  modified_base 12: mod_base = m5c; mod_base = OTHER; note = sugar modification: 2'-O-methoxyethylribose; note = backbone modification: 5'-phosphorothioate
  modified_base 13: mod_base = OTHER; note = sugar modification: 2'-O-methoxyethylribose; note = backbone modification: 5'-phosphorothioate
  modified_base 14: mod_base = OTHER; note = sugar modification: 2'-O-methoxyethylribose; note = backbone modification: 5'-phosphorothioate
  modified_base 15: mod_base = OTHER; note = backbone modification: 5'-phosphorothioate; note = sugar modification: 2-fluororibose
  modified_base 16: mod_base = OTHER; note = sugar modification: 2-fluororibose; note = backbone modification: 5'-phosphorothioate
  modified_base 17: mod_base = OTHER; note = backbone modification: 5'-phosphorothioate; note = sugar modification: 2-fluororibose
  modified_base 18: mod_base = OTHER; note = sugar modification: 2-fluororibose
ctgaattctttcaactag

SEQ ID NO: 1283 - RNA, 18 nt, synthetic construct
  source 1..18: mol_type = other RNA; note = Antisense oligonucleotide
  modified_base 1: mod_base = OTHER; note = backbone modification: 5'-phosphorothioate; note = sugar modification: 2-fluororibose
  modified_base 2: mod_base = OTHER; note = sugar modification: 2-fluororibose; note = backbone modification: 5'-phosphorothioate
  modified_base 3: mod_base = OTHER; note = sugar modification: 2-fluororibose; note = backbone modification: 5'-phosphorothioate
  modified_base 4: mod_base = OTHER; note = backbone modification: 5'-phosphorothioate; note = sugar modification: 2-fluororibose
  modified_base 5: mod_base = OTHER; note = backbone modification: 5'-phosphorothioate; note = sugar modification: 2-fluororibose
  modified_base 6: mod_base = OTHER; note = sugar modification: 2'-O-methoxyethylribose; note = backbone modification: 5'-phosphorothioate; note = thymine
  modified_base 7: mod_base = OTHER; note = sugar modification: 2'-O-methoxyethylribose; note = backbone modification: 5'-phosphorothioate; note = thymine
  modified_base 8: mod_base = OTHER; mod_base = m5c; note = backbone modification: 5'-phosphorothioate; note = sugar modification: 2'-O-methoxyethylribose
  modified_base 9: mod_base = OTHER; note = backbone modification: 5'-phosphorothioate; note = sugar modification: 2'-O-methoxyethylribose; note = thymine
  modified_base 10: mod_base = OTHER; note = backbone modification: 5'-phosphorothioate; note = sugar modification: 2'-O-methoxyethylribose; note = thymine
  modified_base 11: mod_base = OTHER; note = backbone modification: 5'-phosphorothioate; note = sugar modification: 2'-O-methoxyethylribose; note = thymine
  modified_base 12: mod_base = m5c; mod_base = OTHER; note = backbone modification: 5'-phosphorothioate; note = sugar modification: 2'-O-methoxyethylribose
  modified_base 13: mod_base = OTHER; note = backbone modification: 5'-phosphorothioate; note = sugar modification: 2'-O-methoxyethylribose
  modified_base 14: mod_base = OTHER; note = backbone modification: 5'-phosphorothioate; note = sugar modification: 2-fluororibose
  modified_base 15: mod_base = OTHER; note = backbone modification: 5'-phosphorothioate; note = sugar modification: 2-fluororibose
  modified_base 16: mod_base = OTHER; note = backbone modification: 5'-phosphorothioate; note = sugar modification: 2-fluororibose
  modified_base 17: mod_base = OTHER; note = backbone modification: 5'-phosphorothioate; note = sugar modification: 2-fluororibose
  modified_base 18: mod_base = OTHER; note = sugar modification: 2-fluororibose
ctgaattctttcaactag

SEQ ID NO: 1284 - RNA, 18 nt, synthetic construct
  source 1..18: mol_type = other RNA; note = Antisense oligonucleotide
  modified_base 1: mod_base = OTHER; note = sugar modification: 2-fluororibose; note = backbone modification: 5'-phosphorothioate
  modified_base 2: mod_base = OTHER; note = backbone modification: 5'-phosphorothioate; note = sugar modification: 2-fluororibose
  modified_base 3: mod_base = OTHER; note = sugar modification: 2-fluororibose; note = backbone modification: 5'-phosphorothioate
  modified_base 4: mod_base = OTHER; note = backbone modification: 5'-phosphorothioate; note = sugar modification: 2-fluororibose
  modified_base 5: mod_base = OTHER; note = sugar modification: 2-fluororibose; note = backbone modification: 5'-phosphorothioate
  modified_base 6: mod_base = OTHER; note = backbone modification: 5'-phosphorothioate; note = sugar modification: 2-fluororibose
  modified_base 7: mod_base = OTHER; note = thymine; note = sugar modification: 2'-O-methoxyethylribose; note = backbone modification: 5'-phosphorothioate
  modified_base 8: mod_base = OTHER; mod_base = m5c; note = backbone modification: 5'-phosphorothioate; note = sugar modification: 2'-O-methoxyethylribose
  modified_base 9: mod_base = OTHER; note = thymine; note = backbone modification: 5'-phosphorothioate; note = sugar modification: 2'-O-methoxyethylribose
  modified_base 10: mod_base = OTHER; note = backbone modification: 5'-phosphorothioate; note = thymine; note = sugar modification: 2'-O-methoxyethylribose
  modified_base 11: mod_base = OTHER; note = backbone modification: 5'-phosphorothioate; note = thymine; note = sugar modification: 2'-O-methoxyethylribose
  modified_base 12: mod_base = m5c; mod_base = OTHER; note = backbone modification: 5'-phosphorothioate; note = sugar modification: 2'-O-methoxyethylribose
  modified_base 13: mod_base = OTHER; note = sugar modification: 2-fluororibose; note = backbone modification: 5'-phosphorothioate
  modified_base 14: mod_base = OTHER; note = backbone modification: 5'-phosphorothioate; note = sugar modification: 2-fluororibose
  modified_base 15: mod_base = OTHER; note = sugar modification: 2-fluororibose; note = backbone modification: 5'-phosphorothioate
  modified_base 16: mod_base = OTHER; note = backbone modification: 5'-phosphorothioate; note = sugar modification: 2-fluororibose
  modified_base 17: mod_base = OTHER; note = backbone modification: 5'-phosphorothioate; note = sugar modification: 2-fluororibose
  modified_base 18: mod_base = OTHER; note = sugar modification: 2-fluororibose
ctgaattctttcaactag

SEQ ID NO: 1285 - RNA, 18 nt, synthetic construct
  source 1..18: mol_type = other RNA; note = Antisense oligonucleotide
  modified_base 1: mod_base = OTHER; note = backbone modification: 5'-phosphorothioate; note = sugar modification: 2-fluororibose
  modified_base 2: mod_base = OTHER; note = backbone modification: 5'-phosphorothioate; note = sugar modification: 2-fluororibose
  modified_base 3: mod_base = OTHER; note = sugar modification: 2-fluororibose; note = backbone modification: 5'-phosphorothioate
  modified_base 4: mod_base = OTHER; note = backbone modification: 5'-phosphorothioate; note = sugar modification: 2-fluororibose
  modified_base 5: mod_base = OTHER; note = sugar modification: 2-fluororibose; note = backbone modification: 5'-phosphorothioate
  modified_base 6: mod_base = OTHER; note = backbone modification: 5'-phosphorothioate; note = sugar modification: 2-fluororibose
  modified_base 7: mod_base = OTHER; note = backbone modification: 5'-phosphorothioate; note = sugar modification: 2-fluororibose
  modified_base 8: mod_base = m5c; mod_base = OTHER; note = backbone modification: 5'-phosphorothioate; note = sugar modification: 2'-O-methoxyethylribose
  modified_base 9: mod_base = OTHER; note = backbone modification: 5'-phosphorothioate; note = thymine; note = sugar modification: 2'-O-methoxyethylribose
  modified_base 10: mod_base = OTHER; note = sugar modification: 2'-O-methoxyethylribose; note = thymine; note = backbone modification: 5'-phosphorothioate
  modified_base 11: mod_base = OTHER; note = sugar modification: 2'-O-methoxyethylribose; note = backbone modification: 5'-phosphorothioate; note = thymine
  modified_base 12: mod_base = OTHER; note = sugar modification: 2-fluororibose; note = backbone modification: 5'-phosphorothioate
  modified_base 13: mod_base = OTHER; note = sugar modification: 2-fluororibose; note = backbone modification: 5'-phosphorothioate
  modified_base 14: mod_base = OTHER; note = backbone modification: 5'-phosphorothioate; note = sugar modification: 2-fluororibose
  modified_base 15: mod_base = OTHER; note = backbone modification: 5'-phosphorothioate; note = sugar modification: 2-fluororibose
  modified_base 16: mod_base = OTHER; note = sugar modification: 2-fluororibose; note = backbone modification: 5'-phosphorothioate
  modified_base 17: mod_base = OTHER; note = backbone modification: 5'-phosphorothioate; note = sugar modification: 2-fluororibose
  modified_base 18: mod_base = OTHER; note = sugar modification: 2-fluororibose
ctgaattctttcaactag

SEQ ID NO: 1286 - RNA, 18 nt, synthetic construct
  source 1..18: mol_type = other RNA; note = Antisense oligonucleotide
  modified_base 1: mod_base = OTHER; note = sugar modification: 2-fluororibose; note = backbone modification: 5'-phosphorothioate
  modified_base 2: mod_base = OTHER; note = sugar modification: 2-fluororibose; note = backbone modification: 5'-phosphorothioate
  modified_base 3: mod_base = OTHER; note = sugar modification: 2-fluororibose; note = backbone modification: 5'-phosphorothioate
  modified_base 4: mod_base = OTHER; note = sugar modification: 2-fluororibose; note = backbone modification: 5'-phosphorothioate
  modified_base 5: mod_base = OTHER; note = sugar modification: 2-fluororibose; note = backbone modification: 5'-phosphorothioate
  modified_base 6: mod_base = OTHER; note = backbone modification: 5'-phosphorothioate; note = sugar modification: 2-fluororibose
  modified_base 7: mod_base = OTHER; note = sugar modification: 2-fluororibose; note = backbone modification: 5'-phosphorothioate
  modified_base 8: mod_base = OTHER; note = sugar modification: 2-fluororibose; note = backbone modification: 5'-phosphorothioate
  modified_base 9: mod_base = OTHER; note = backbone modification: 5'-phosphorothioate; note = sugar modification: 2'-O-methoxyethylribose; note = thymine
  modified_base 10: mod_base = OTHER; note = backbone modification: 5'-phosphorothioate; note = thymine; note = sugar modification: 2'-O-methoxyethylribose
  modified_base 11: mod_base = OTHER; note = sugar modification: 2-fluororibose; note = backbone modification: 5'-phosphorothioate
  modified_base 12: mod_base = OTHER; note = backbone modification: 5'-phosphorothioate; note = sugar modification: 2-fluororibose
  modified_base 13: mod_base = OTHER; note = backbone modification: 5'-phosphorothioate; note = sugar modification: 2-fluororibose
  modified_base 14: mod_base = OTHER; note = backbone modification: 5'-phosphorothioate; note = sugar modification: 2-fluororibose
  modified_base 15: mod_base = OTHER; note = backbone modification: 5'-phosphorothioate; note = sugar modification: 2-fluororibose
  modified_base 16: mod_base = OTHER; note = sugar modification: 2-fluororibose; note = backbone modification: 5'-phosphorothioate
  modified_base 17: mod_base = OTHER; note = backbone modification: 5'-phosphorothioate; note = sugar modification: 2-fluororibose
  modified_base 18: mod_base = OTHER; note = sugar modification: 2-fluororibose
ctgaattctttcaactag

SEQ ID NO: 1287 - RNA, 18 nt, synthetic construct
  source 1..18: mol_type = other RNA; note = Antisense oligonucleotide
  modified_base 1: mod_base = OTHER; note = sugar modification: 2-fluororibose; note = backbone modification: 5'-phosphorothioate
  modified_base 2: mod_base = OTHER; note = backbone modification: 5'-phosphorothioate; note = sugar modification: 2-fluororibose
  modified_base 3: mod_base = OTHER; note = sugar modification: 2-fluororibose; note = backbone modification: 5'-phosphorothioate
  modified_base 4: mod_base = OTHER; note = sugar modification: 2-fluororibose; note = backbone modification: 5'-phosphorothioate
  modified_base 5: mod_base = OTHER; note = sugar modification: 2-fluororibose; note = backbone modification: 5'-phosphorothioate
  modified_base 6: mod_base = OTHER; note = sugar modification: 2-fluororibose; note = backbone modification: 5'-phosphorothioate
  modified_base 7: mod_base = OTHER; note = backbone modification: 5'-phosphorothioate; note = sugar modification: 2-fluororibose
  modified_base 8: mod_base = OTHER; note = sugar modification: 2-fluororibose; note = backbone modification: 5'-phosphorothioate
  modified_base 9: mod_base = OTHER; note = sugar modification: 2-fluororibose; note = backbone modification: 5'-phosphorothioate
  modified_base 10: mod_base = OTHER; note = sugar modification: 2-fluororibose; note = backbone modification: 5'-phosphorothioate
  modified_base 11: mod_base = OTHER; note = sugar modification: 2-fluororibose; note = backbone modification: 5'-phosphorothioate
  modified_base 12: mod_base = OTHER; note = sugar modification: 2-fluororibose; note = backbone modification: 5'-phosphorothioate
  modified_base 13: mod_base = OTHER; note = backbone modification: 5'-phosphorothioate; note = sugar modification: 2-fluororibose
  modified_base 14: mod_base = OTHER; note = sugar modification: 2-fluororibose; note = backbone modification: 5'-phosphorothioate
  modified_base 15: mod_base = OTHER; note = sugar modification: 2-fluororibose; note = backbone modification: 5'-phosphorothioate
  modified_base 16: mod_base = OTHER; note = backbone modification: 5'-phosphorothioate; note = sugar modification: 2-fluororibose
  modified_base 17: mod_base = OTHER; note = sugar modification: 2-fluororibose; note = backbone modification: 5'-phosphorothioate
  modified_base 18: mod_base = OTHER; note = sugar modification: 2-fluororibose
ctgaattctttcaactag

SEQ ID NO: 1288 - RNA, 18 nt, synthetic construct
  source 1..18: mol_type = other RNA; note = Antisense oligonucleotide
  modified_base 1: mod_base = OTHER; note = sugar modification: 2-fluororibose; note = backbone modification: 5'-phosphorothioate
  modified_base 2: mod_base = OTHER; note = thymine; note = sugar modification: 2'-O-methoxyethylribose; note = backbone modification: 5'-phosphorothioate
  modified_base 3: mod_base = OTHER; note = sugar modification: 2-fluororibose; note = backbone modification: 5'-phosphorothioate
  modified_base 4: mod_base = OTHER; note = backbone modification: 5'-phosphorothioate; note = sugar modification: 2'-O-methoxyethylribose
  modified_base 5: mod_base = OTHER; note = sugar modification: 2-fluororibose; note = backbone modification: 5'-phosphorothioate
  modified_base 6: mod_base = OTHER; note = thymine; note = backbone modification: 5'-phosphorothioate; note = sugar modification: 2'-O-methoxyethylribose
  modified_base 7: mod_base = OTHER; note = sugar modification: 2-fluororibose; note = backbone modification: 5'-phosphorothioate
  modified_base 8: mod_base = m5c; mod_base = OTHER; note = sugar modification: 2'-O-methoxyethylribose; note = backbone modification: 5'-phosphorothioate
  modified_base 9: mod_base = OTHER; note = backbone modification: 5'-phosphorothioate; note = sugar modification: 2-fluororibose
  modified_base 10: mod_base = OTHER; note = backbone modification: 5'-phosphorothioate; note = thymine; note = sugar modification: 2'-O-methoxyethylribose
  modified_base 11: mod_base = OTHER; note = backbone modification: 5'-phosphorothioate; note = sugar modification: 2-fluororibose
  modified_base 12: mod_base = OTHER; mod_base = m5c; note = backbone modification: 5'-phosphorothioate; note = sugar modification: 2'-O-methoxyethylribose
  modified_base 13: mod_base = OTHER; note = sugar modification: 2-fluororibose; note = backbone modification: 5'-phosphorothioate
  modified_base 14: mod_base = OTHER; note = backbone modification: 5'-phosphorothioate; note = sugar modification: 2'-O-methoxyethylribose
  modified_base 15: mod_base = OTHER; note = sugar modification: 2-fluororibose; note = backbone modification: 5'-phosphorothioate
  modified_base 16: mod_base = OTHER; note = sugar modification: 2'-O-methoxyethylribose; note = thymine; note = backbone modification: 5'-phosphorothioate
  modified_base 17: mod_base = OTHER; note = backbone modification: 5'-phosphorothioate; note = sugar modification: 2-fluororibose
  modified_base 18: mod_base = OTHER; note = sugar modification: 2'-O-methoxyethylribose
ctgaattctttcaactag

SEQ ID NO: 1289 - RNA, 18 nt, synthetic construct
  source 1..18: mol_type = other RNA; note = Antisense oligonucleotide
  modified_base 1: mod_base = OTHER; mod_base = m5c; note = backbone modification: 5'-phosphorothioate; note = sugar modification: 2'-O-methoxyethylribose
  modified_base 2: mod_base = OTHER; note = backbone modification: 5'-phosphorothioate; note = sugar modification: 2-fluororibose
  modified_base 3: mod_base = OTHER; note = sugar modification: 2'-O-methoxyethylribose; note = backbone modification: 5'-phosphorothioate
  modified_base 4: mod_base = OTHER; note = backbone modification: 5'-phosphorothioate; note = sugar modification: 2-fluororibose
  modified_base 5: mod_base = OTHER; note = sugar modification: 2'-O-methoxyethylribose; note = backbone modification: 5'-phosphorothioate
  modified_base 6: mod_base = OTHER; note = backbone modification: 5'-phosphorothioate; note = sugar modification: 2-fluororibose
  modified_base 7: mod_base = OTHER; note = thymine; note = backbone modification: 5'-phosphorothioate; note = sugar modification: 2'-O-methoxyethylribose
  modified_base 8: mod_base = OTHER; note = sugar modification: 2-fluororibose; note = backbone modification: 5'-phosphorothioate
  modified_base 9: mod_base = OTHER; note = backbone modification: 5'-phosphorothioate; note = sugar modification: 2'-O-methoxyethylribose; note = thymine
  modified_base 10: mod_base = OTHER; note = sugar modification: 2-fluororibose; note = backbone modification: 5'-phosphorothioate
  modified_base 11: mod_base = OTHER; note = sugar modification: 2'-O-methoxyethylribose; note = thymine; note = backbone modification: 5'-phosphorothioate
  modified_base 12: mod_base = OTHER; note = backbone modification: 5'-phosphorothioate; note = sugar modification: 2-fluororibose
  modified_base 13: mod_base = OTHER; note = sugar modification: 2'-O-methoxyethylribose; note = backbone modification: 5'-phosphorothioate
  modified_base 14: mod_base = OTHER; note = backbone modification: 5'-phosphorothioate; note = sugar modification: 2-fluororibose
  modified_base 15: mod_base = m5c; mod_base = OTHER; note = backbone modification: 5'-phosphorothioate; note = sugar modification: 2'-O-methoxyethylribose
  modified_base 16: mod_base = OTHER; note = backbone modification: 5'-phosphorothioate; note = sugar modification: 2-fluororibose
  modified_base 17: mod_base = OTHER; note = backbone modification: 5'-phosphorothioate; note = sugar modification: 2'-O-methoxyethylribose
  modified_base 18: mod_base = OTHER; note = sugar modification: 2-fluororibose
ctgaattctttcaactag

SEQ ID NO: 1290 - RNA, 18 nt, synthetic construct
  source 1..18: mol_type = other RNA; note = Antisense oligonucleotide
  modified_base 1: mod_base = OTHER; note = sugar modification: 2-fluororibose; note = backbone modification: 5'-phosphorothioate
  modified_base 2: mod_base = OTHER; note = backbone modification: 5'-phosphorothioate; note = sugar modification: 2-fluororibose
  modified_base 3: mod_base = OTHER; note = sugar modification: 2'-O-methoxyethylribose; note = backbone modification: 5'-phosphorothioate
  modified_base 4: mod_base = OTHER; note = sugar modification: 2'-O-methoxyethylribose; note = backbone modification: 5'-phosphorothioate
  modified_base 5: mod_base = OTHER; note = backbone modification: 5'-phosphorothioate; note = sugar modification: 2-fluororibose
  modified_base 6: mod_base = OTHER; note = sugar modification: 2-fluororibose; note = backbone modification: 5'-phosphorothioate
  modified_base 7: mod_base = OTHER; note = backbone modification: 5'-phosphorothioate; note = thymine; note = sugar modification: 2'-O-methoxyethylribose
  modified_base 8: mod_base = m5c; mod_base = OTHER; note = sugar modification: 2'-O-methoxyethylribose; note = backbone modification: 5'-phosphorothioate
  modified_base 9: mod_base = OTHER; note = backbone modification: 5'-phosphorothioate; note = sugar modification: 2-fluororibose
  modified_base 10: mod_base = OTHER; note = sugar modification: 2-fluororibose; note = backbone modification: 5'-phosphorothioate
  modified_base 11: mod_base = OTHER; note = sugar modification: 2'-O-methoxyethylribose; note = backbone modification: 5'-phosphorothioate; note = thymine
  modified_base 12: mod_base = m5c; mod_base = OTHER; note = backbone modification: 5'-phosphorothioate; note = sugar modification: 2'-O-methoxyethylribose
  modified_base 13: mod_base = OTHER; note = backbone modification: 5'-phosphorothioate; note = sugar modification: 2-fluororibose
  modified_base 14: mod_base = OTHER; note = backbone modification: 5'-phosphorothioate; note = sugar modification: 2-fluororibose
  modified_base 15: mod_base = m5c; mod_base = OTHER; note = backbone modification: 5'-phosphorothioate; note = sugar modification: 2'-O-methoxyethylribose
  modified_base 16: mod_base = OTHER; note = thymine; note = sugar modification: 2'-O-methoxyethylribose; note = backbone modification: 5'-phosphorothioate
  modified_base 17: mod_base = OTHER; note = sugar modification: 2-fluororibose; note = backbone modification: 5'-phosphorothioate
  modified_base 18: mod_base = OTHER; note = sugar modification: 2-fluororibose
ctgaattctttcaactag

SEQ ID NO: 1291 - RNA, 18 nt, synthetic construct
  source 1..18: mol_type = other RNA; note = Antisense oligonucleotide
  modified_base 1: mod_base = OTHER; note = sugar modification: 2-fluororibose; note = backbone modification: 5'-phosphorothioate
  modified_base 2: mod_base = OTHER; note = backbone modification: 5'-phosphorothioate; note = sugar modification: 2-fluororibose
  modified_base 3: mod_base = OTHER; note = sugar modification: 2-fluororibose; note = backbone modification: 5'-phosphorothioate
  modified_base 4: mod_base = OTHER; note = sugar modification: 2'-O-methoxyethylribose; note = backbone modification: 5'-phosphorothioate
  modified_base 5: mod_base = OTHER; note = sugar modification: 2'-O-methoxyethylribose; note = backbone modification: 5'-phosphorothioate
  modified_base 6: mod_base = OTHER; note = thymine; note = sugar modification: 2'-O-methoxyethylribose; note = backbone modification: 5'-phosphorothioate
  modified_base 7: mod_base = OTHER; note = backbone modification: 5'-phosphorothioate; note = sugar modification: 2-fluororibose
  modified_base 8: mod_base = OTHER; note = sugar modification: 2-fluororibose; note = backbone modification: 5'-phosphorothioate
  modified_base 9: mod_base = OTHER; note = backbone modification: 5'-phosphorothioate; note = sugar modification: 2-fluororibose
  modified_base 10: mod_base = OTHER; note = sugar modification: 2'-O-methoxyethylribose; note = thymine; note = backbone modification: 5'-phosphorothioate
  modified_base 11: mod_base = OTHER; note = sugar modification: 2'-O-methoxyethylribose; note = backbone modification: 5'-phosphorothioate; note = thymine
  modified_base 12: mod_base = m5c; mod_base = OTHER; note = backbone modification: 5'-phosphorothioate; note = sugar modification: 2'-O-methoxyethylribose
  modified_base 13: mod_base = OTHER; note = sugar modification: 2-fluororibose; note = backbone modification: 5'-phosphorothioate
  modified_base 14: mod_base = OTHER; note = sugar modification: 2-fluororibose; note = backbone modification: 5'-phosphorothioate
  modified_base 15: mod_base = OTHER; note = sugar modification: 2-fluororibose; note = backbone modification: 5'-phosphorothioate
  modified_base 16: mod_base = OTHER; note = thymine; note = backbone modification: 5'-phosphorothioate; note = sugar modification: 2'-O-methoxyethylribose
  modified_base 17: mod_base = OTHER; note = sugar modification: 2'-O-methoxyethylribose; note = backbone modification: 5'-phosphorothioate
  modified_base 18: mod_base = OTHER; note = sugar modification: 2'-O-methoxyethylribose
ctgaattctttcaactag

SEQ ID NO: 1292 - RNA, 18 nt, synthetic construct
  source 1..18: mol_type = other RNA; note = Antisense oligonucleotide
  modified_base 1: mod_base = m5c; mod_base = OTHER; note = backbone modification: 5'-phosphorothioate; note = sugar modification: 2'-O-methoxyethylribose
  modified_base 2: mod_base = OTHER; note = sugar modification: 2'-O-methoxyethylribose; note = thymine; note = backbone modification: 5'-phosphorothioate
  modified_base 3: mod_base = OTHER; note = backbone modification: 5'-phosphorothioate; note = sugar modification: 2'-O-methoxyethylribose
  modified_base 4: mod_base = OTHER; note = backbone modification: 5'-phosphorothioate; note = sugar modification: 2'-O-methoxyethylribose
  modified_base 5: mod_base = OTHER; note = backbone modification: 5'-phosphorothioate; note = sugar modification: 2'-O-methoxyethylribose
  modified_base 6: mod_base = OTHER; note = thymine; note = backbone modification: 5'-phosphorothioate; note = sugar modification: 2'-O-methoxyethylribose
  modified_base 7: mod_base = OTHER; note = sugar modification: 2'-O-methoxyethylribose; note = thymine; note = backbone modification: 5'-phosphorothioate
  modified_base 8: mod_base = OTHER; mod_base = m5c; note = backbone modification: 5'-phosphorothioate; note = sugar modification: 2'-O-methoxyethylribose
  modified_base 9: mod_base = OTHER; note = sugar modification: 2-fluororibose; note = backbone modification: 5'-phosphorothioate
  modified_base 10: mod_base = OTHER; note = backbone modification: 5'-phosphorothioate; note = sugar modification: 2-fluororibose
  modified_base 11: mod_base = OTHER; note = thymine; note = backbone modification: 5'-phosphorothioate; note = sugar modification: 2'-O-methoxyethylribose
  modified_base 12: mod_base = OTHER; mod_base = m5c; note = sugar modification: 2'-O-methoxyethylribose; note = backbone modification: 5'-phosphorothioate
  modified_base 13: mod_base = OTHER; note = sugar modification: 2'-O-methoxyethylribose; note = backbone modification: 5'-phosphorothioate
  modified_base 14: mod_base = OTHER; note = sugar modification: 2'-O-methoxyethylribose; note = backbone modification: 5'-phosphorothioate
  modified_base 15: mod_base = OTHER; mod_base = m5c; note = sugar modification: 2'-O-methoxyethylribose; note = backbone modification: 5'-phosphorothioate
  modified_base 16: mod_base = OTHER; note = sugar modification: 2'-O-methoxyethylribose; note = thymine; note = backbone modification: 5'-phosphorothioate
  modified_base 17: mod_base = OTHER; note = sugar modification: 2'-O-methoxyethylribose; note = backbone modification: 5'-phosphorothioate
  modified_base 18: mod_base = OTHER; note = sugar modification: 2'-O-methoxyethylribose
ctgaattctttcaactag

SEQ ID NO: 1293 - RNA, 18 nt, synthetic construct
  source 1..18: mol_type = other RNA; note = Antisense oligonucleotide
  modified_base 1: mod_base = OTHER; mod_base = m5c; note = backbone modification: 5'-phosphorothioate; note = sugar modification: 2'-O-methoxyethylribose
  modified_base 2: mod_base = OTHER; note = backbone modification: 5'-phosphorothioate; note = thymine; note = sugar modification: 2'-O-methoxyethylribose
  modified_base 3: mod_base = OTHER; note = sugar modification: 2'-O-methoxyethylribose; note = backbone modification: 5'-phosphorothioate
  modified_base 4: mod_base = OTHER; note = backbone modification: 5'-phosphorothioate; note = sugar modification: 2'-O-methoxyethylribose
  modified_base 5: mod_base = OTHER; note = sugar modification: 2'-O-methoxyethylribose; note = backbone modification: 5'-phosphorothioate
  modified_base 6: mod_base = OTHER; note = backbone modification: 5'-phosphorothioate; note = sugar modification: 2'-O-methoxyethylribose; note = thymine
  modified_base 7: mod_base = OTHER; note = backbone modification: 5'-phosphorothioate; note = sugar modification: 2'-O-methoxyethylribose; note = thymine
  modified_base 8: mod_base = OTHER; note = sugar modification: 2-fluororibose; note = backbone modification: 5'-phosphorothioate
  modified_base 9: mod_base = OTHER; note = sugar modification: 2-fluororibose; note = backbone modification: 5'-phosphorothioate
  modified_base 10: mod_base = OTHER; note = sugar modification: 2-fluororibose; note = backbone modification: 5'-phosphorothioate
  modified_base 11: mod_base = OTHER; note = sugar modification: 2-fluororibose; note = backbone modification: 5'-phosphorothioate
  modified_base 12: mod_base = OTHER; mod_base = m5c; note = backbone modification: 5'-phosphorothioate; note = sugar modification: 2'-O-methoxyethylribose
  modified_base 13: mod_base = OTHER; note = sugar modification: 2'-O-methoxyethylribose; note = backbone modification: 5'-phosphorothioate
  modified_base 14: mod_base = OTHER; note = backbone modification: 5'-phosphorothioate; note = sugar modification: 2'-O-methoxyethylribose
  modified_base 15: mod_base = m5c; mod_base = OTHER; note = sugar modification: 2'-O-methoxyethylribose; note = backbone modification: 5'-phosphorothioate
  modified_base 16: mod_base = OTHER; note = backbone modification: 5'-phosphorothioate; note = thymine; note = sugar modification: 2'-O-methoxyethylribose
  modified_base 17: mod_base = OTHER; note = sugar modification: 2'-O-methoxyethylribose; note = backbone modification: 5'-phosphorothioate
  modified_base 18: mod_base = OTHER; note = sugar modification: 2'-O-methoxyethylribose
ctgaattctttcaactag

SEQ ID NO: 1294 - RNA, 18 nt, synthetic construct
  source 1..18: mol_type = other RNA; note = Antisense oligonucleotide
  modified_base 1: mod_base = OTHER; mod_base = m5c; note = backbone modification: 5'-phosphorothioate; note = sugar modification: 2'-O-methoxyethylribose
  modified_base 2: mod_base = OTHER; note = thymine; note = backbone modification: 5'-phosphorothioate; note = sugar modification: 2'-O-methoxyethylribose
  modified_base 3: mod_base = OTHER; note = sugar modification: 2'-O-methoxyethylribose; note = backbone modification: 5'-phosphorothioate
  modified_base 4: mod_base = OTHER; note = backbone modification: 5'-phosphorothioate; note = sugar modification: 2'-O-methoxyethylribose
  modified_base 5: mod_base = OTHER; note = backbone modification: 5'-phosphorothioate; note = sugar modification: 2'-O-methoxyethylribose
  modified_base 6: mod_base = OTHER; note = thymine; note = backbone modification: 5'-phosphorothioate; note = sugar modification: 2'-O-methoxyethylribose
  modified_base 7: mod_base = OTHER; note = backbone modification: 5'-phosphorothioate; note = sugar modification: 2-fluororibose
  modified_base 8: mod_base = OTHER; note = sugar modification: 2-fluororibose; note = backbone modification: 5'-phosphorothioate
  modified_base 9: mod_base = OTHER; note = sugar modification: 2-fluororibose; note = backbone modification: 5'-phosphorothioate
  modified_base 10: mod_base = OTHER; note = sugar modification: 2-fluororibose; note = backbone modification: 5'-phosphorothioate
  modified_base 11: mod_base = OTHER; note = sugar modification: 2-fluororibose; note = backbone modification: 5'-phosphorothioate
  modified_base 12: mod_base = OTHER; note = backbone modification: 5'-phosphorothioate; note = sugar modification: 2-fluororibose
  modified_base 13: mod_base = OTHER; note = sugar modification: 2'-O-methoxyethylribose; note = backbone modification: 5'-phosphorothioate
  modified_base 14: mod_base = OTHER; note = backbone modification: 5'-phosphorothioate; note = sugar modification: 2'-O-methoxyethylribose
  modified_base 15: mod_base = OTHER; mod_base = m5c; note = sugar modification: 2'-O-methoxyethylribose; note = backbone modification: 5'-phosphorothioate
  modified_base 16: mod_base = OTHER; note = sugar modification: 2'-O-methoxyethylribose; note = backbone modification: 5'-phosphorothioate; note = thymine
  modified_base 17: mod_base = OTHER; note = backbone modification: 5'-phosphorothioate; note = sugar modification: 2'-O-methoxyethylribose
  modified_base 18: mod_base = OTHER; note = sugar modification: 2'-O-methoxyethylribose
ctgaattctttcaactag

SEQ ID NO: 1295 - RNA, 18 nt, synthetic construct
  source 1..18: mol_type = other RNA; note = Antisense oligonucleotide
  modified_base 1: mod_base = OTHER; mod_base = m5c; note = sugar modification: 2'-O-methoxyethylribose; note = backbone modification: 5'-phosphorothioate
  modified_base 2: mod_base = OTHER; note = backbone modification: 5'-phosphorothioate; note = sugar modification: 2'-O-methoxyethylribose; note = thymine
  modified_base 3: mod_base = OTHER; note = sugar modification: 2'-O-methoxyethylribose; note = backbone modification: 5'-phosphorothioate
  modified_base 4: mod_base = OTHER; note = backbone modification: 5'-phosphorothioate; note = sugar modification: 2'-O-methoxyethylribose
  modified_base 5: mod_base = OTHER; note = sugar modification: 2'-O-methoxyethylribose; note = backbone modification: 5'-phosphorothioate
  modified_base 6: mod_base = OTHER; note = backbone modification: 5'-phosphorothioate; note = sugar modification: 2-fluororibose
  modified_base 7: mod_base = OTHER; note = sugar modification: 2-fluororibose; note = backbone modification: 5'-phosphorothioate
  modified_base 8: mod_base = OTHER; note = sugar modification: 2-fluororibose; note = backbone modification: 5'-phosphorothioate
  modified_base 9: mod_base = OTHER; note = backbone modification: 5'-phosphorothioate; note = sugar modification: 2-fluororibose
  modified_base 10: mod_base = OTHER; note = backbone modification: 5'-phosphorothioate; note = sugar modification: 2-fluororibose
  modified_base 11: mod_base = OTHER; note = sugar modification: 2-fluororibose; note = backbone modification: 5'-phosphorothioate
  modified_base 12: mod_base = OTHER; note = backbone modification: 5'-phosphorothioate; note = sugar modification: 2-fluororibose
  modified_base 13: mod_base = OTHER; note = backbone modification: 5'-phosphorothioate; note = sugar modification: 2-fluororibose
  modified_base 14: mod_base = OTHER; note = sugar modification: 2'-O-methoxyethylribose; note = backbone modification: 5'-phosphorothioate
  modified_base 15: mod_base = OTHER; mod_base = m5c; note = backbone modification: 5'-phosphorothioate; note = sugar modification: 2'-O-methoxyethylribose
  modified_base 16: mod_base = OTHER; note = thymine; note = backbone modification: 5'-phosphorothioate; note = sugar modification: 2'-O-methoxyethylribose
  modified_base 17: mod_base = OTHER; note = backbone modification: 5'-phosphorothioate; note = sugar modification: 2'-O-methoxyethylribose
  modified_base 18: mod_base = OTHER; note = sugar modification: 2'-O-methoxyethylribose
ctgaattctttcaactag

SEQ ID NO: 1296 - RNA, 18 nt, synthetic construct
  source 1..18: mol_type = other RNA; note = Antisense oligonucleotide
  modified_base 1: mod_base = OTHER; mod_base = m5c; note = sugar modification: 2'-O-methoxyethylribose; note = backbone modification: 5'-phosphorothioate
  modified_base 2: mod_base = OTHER; note = sugar modification: 2'-O-methoxyethylribose; note = thymine; note = backbone modification: 5'-phosphorothioate
  modified_base 3: mod_base = OTHER; note = backbone modification: 5'-phosphorothioate; note = sugar modification: 2'-O-methoxyethylribose
  modified_base 4: mod_base = OTHER; note = sugar modification: 2'-O-methoxyethylribose; note = backbone modification: 5'-phosphorothioate
  modified_base 5: mod_base = OTHER; note = backbone modification: 5'-phosphorothioate; note = sugar modification: 2-fluororibose
  modified_base 6: mod_base = OTHER; note = backbone modification: 5'-phosphorothioate; note = sugar modification: 2-fluororibose
  modified_base 7: mod_base = OTHER; note = sugar modification: 2-fluororibose; note = backbone modification: 5'-phosphorothioate
  modified_base 8: mod_base = OTHER; note = sugar modification: 2-fluororibose; note = backbone modification: 5'-phosphorothioate
  modified_base 9: mod_base = OTHER; note = sugar modification: 2-fluororibose; note = backbone modification: 5'-phosphorothioate
  modified_base 10: mod_base = OTHER; note = backbone modification: 5'-phosphorothioate; note = sugar modification: 2-fluororibose
  modified_base 11: mod_base = OTHER; note = sugar modification: 2-fluororibose; note = backbone modification: 5'-phosphorothioate
  modified_base 12: mod_base = OTHER; note = backbone modification: 5'-phosphorothioate; note = sugar modification: 2-fluororibose
  modified_base 13: mod_base = OTHER; note = sugar modification: 2-fluororibose; note = backbone modification: 5'-phosphorothioate
  modified_base 14: mod_base = OTHER; note = sugar modification: 2-fluororibose; note = backbone modification: 5'-phosphorothioate
  modified_base 15: mod_base = m5c; mod_base = OTHER; note = backbone modification: 5'-phosphorothioate; note = sugar modification: 2'-O-methoxyethylribose
  modified_base 16: mod_base = OTHER; note = backbone modification: 5'-phosphorothioate; note = sugar modification: 2'-O-methoxyethylribose; note = thymine
  modified_base 17: mod_base = OTHER; note = backbone modification: 5'-phosphorothioate; note = sugar modification: 2'-O-methoxyethylribose
  modified_base 18: mod_base = OTHER; note = sugar modification: 2'-O-methoxyethylribose
ctgaattctttcaactag

SEQ ID NO: 1297 - RNA, 18 nt, synthetic construct
  source 1..18: mol_type = other RNA; note = Antisense oligonucleotide
  modified_base 1: mod_base = OTHER; mod_base = m5c; note = sugar modification: 2'-O-methoxyethylribose; note = backbone modification: 5'-phosphorothioate
  modified_base 2: mod_base = OTHER; note = thymine; note = sugar modification: 2'-O-methoxyethylribose; note = backbone modification: 5'-phosphorothioate
  modified_base 3: mod_base = OTHER; note = sugar modification: 2'-O-methoxyethylribose; note = backbone modification: 5'-phosphorothioate
  modified_base 4: mod_base = OTHER; note = sugar modification: 2-fluororibose; note = backbone modification: 5'-phosphorothioate
  modified_base 5: mod_base = OTHER; note = backbone modification: 5'-phosphorothioate; note = sugar modification: 2-fluororibose
  modified_base 6: mod_base = OTHER; note = backbone modification: 5'-phosphorothioate; note = sugar modification: 2-fluororibose
  modified_base 7: mod_base = OTHER; note = backbone modification: 5'-phosphorothioate; note = sugar modification: 2-fluororibose
  modified_base 8: mod_base = OTHER; note = backbone modification: 5'-phosphorothioate; note = sugar modification: 2-fluororibose
  modified_base 9: mod_base = OTHER; note = backbone modification: 5'-phosphorothioate; note = sugar modification: 2-fluororibose
  modified_base 10: mod_base = OTHER; note = backbone modification: 5'-phosphorothioate; note = sugar modification: 2-fluororibose
  modified_base 11: mod_base = OTHER; note = sugar modification: 2-fluororibose; note = backbone modification: 5'-phosphorothioate
  modified_base 12: mod_base = OTHER; note = backbone modification: 5'-phosphorothioate; note = sugar modification: 2-fluororibose
  modified_base 13: mod_base = OTHER; note = sugar modification: 2-fluororibose; note = backbone modification: 5'-phosphorothioate
  modified_base 14: mod_base = OTHER; note = sugar modification: 2-fluororibose; note = backbone modification: 5'-phosphorothioate
  modified_base 15: mod_base = OTHER; note = sugar modification: 2-fluororibose; note = backbone modification: 5'-phosphorothioate
  modified_base 16: mod_base = OTHER; note = sugar modification: 2'-O-methoxyethylribose; note = thymine; note = backbone modification: 5'-phosphorothioate
  modified_base 17: mod_base = OTHER; note = backbone modification: 5'-phosphorothioate; note = sugar modification: 2'-O-methoxyethylribose
  modified_base 18: mod_base = OTHER; note = sugar modification: 2'-O-methoxyethylribose
ctgaattctttcaactag

SEQ ID NO: 1298 - RNA, 18 nt, synthetic construct
  source 1..18: mol_type = other RNA; note = Antisense oligonucleotide
  modified_base 1: mod_base = OTHER; note = thymine; note = sugar modification: lna; note = backbone modification: 5'-phosphorothioate
  modified_base 2: mod_base = OTHER; note = backbone modification: 5'-phosphorothioate; note = thymine; note = sugar modification: 2'-O-methoxyethylribose
  modified_base 3: mod_base = OTHER; mod_base = m5c; note = backbone modification: 5'-phosphorothioate; note = sugar modification: 2'-O-methoxyethylribose
  modified_base 4: mod_base = OTHER; note = backbone modification: 5'-phosphorothioate; note = sugar modification: 2'-O-methoxyethylribose; note = thymine
  modified_base 5: mod_base = OTHER; note = sugar modification: 2'-O-methoxyethylribose; note = backbone modification: 5'-phosphorothioate
  modified_base 6: mod_base = OTHER; note = sugar modification: 2'-O-methoxyethylribose; note = backbone modification: 5'-phosphorothioate
  modified_base 7: mod_base = OTHER; note = backbone modification: 5'-phosphorothioate; note = sugar modification: 2'-O-methoxyethylribose
  modified_base 8: mod_base = OTHER; note = sugar modification: 2'-O-methoxyethylribose; note = thymine; note = backbone modification: 5'-phosphorothioate
  modified_base 9: mod_base = OTHER; note = sugar modification: 2'-O-methoxyethylribose; note = backbone modification: 5'-phosphorothioate; note = thymine
  modified_base 10: mod_base = OTHER; mod_base = m5c; note = backbone modification: 5'-phosphorothioate; note = sugar modification: 2'-O-methoxyethylribose
  modified_base 11: mod_base = OTHER; note = backbone modification: 5'-phosphorothioate; note = sugar modification: 2'-O-methoxyethylribose; note = thymine
  modified_base 12: mod_base = OTHER; note = thymine; note = backbone modification: 5'-phosphorothioate; note = sugar modification: 2'-O-methoxyethylribose
  modified_base 13: mod_base = OTHER; note = thymine; note = backbone modification: 5'-phosphorothioate; note = sugar modification: 2'-O-methoxyethylribose
  modified_base 14: mod_base = m5c; mod_base = OTHER; note = backbone modification: 5'-phosphorothioate; note = sugar modification: 2'-O-methoxyethylribose
  modified_base 15: mod_base = OTHER; note = backbone modification: 5'-phosphorothioate; note = sugar modification: 2'-O-methoxyethylribose
  modified_base 16: mod_base = OTHER; note = backbone modification: 5'-phosphorothioate; note = sugar modification: 2'-O-methoxyethylribose
  modified_base 17: mod_base = m5c; mod_base = OTHER; note = sugar modification: 2'-O-methoxyethylribose; note = backbone modification: 5'-phosphorothioate
  modified_base 18: mod_base = OTHER; note = sugar modification: lna; note = thymine
ttctgaattctttcaact

SEQ ID NO: 1299 - RNA, 18 nt, synthetic construct
  source 1..18: mol_type = other RNA; note = Antisense oligonucleotide
  modified_base 1: mod_base = OTHER; note = backbone modification: 5'-phosphorothioate; note = thymine; note = sugar modification: lna
  modified_base 2: mod_base = OTHER; note = thymine; note = backbone modification: 5'-phosphorothioate; note = sugar modification: lna
  modified_base 3: mod_base = OTHER; mod_base = m5c; note = backbone modification: 5'-phosphorothioate; note = sugar modification: 2'-O-methoxyethylribose
  modified_base 4: mod_base = OTHER; note = backbone modification: 5'-phosphorothioate; note = sugar modification: 2'-O-methoxyethylribose; note = thymine
  modified_base 5: mod_base = OTHER; note = backbone modification: 5'-phosphorothioate; note = sugar modification: 2'-O-methoxyethylribose
  modified_base 6: mod_base = OTHER; note = backbone modification: 5'-phosphorothioate; note = sugar modification: 2'-O-methoxyethylribose
  modified_base 7: mod_base = OTHER; note = sugar modification: 2'-O-methoxyethylribose; note = backbone modification: 5'-phosphorothioate
  modified_base 8: mod_base = OTHER; note = backbone modification: 5'-phosphorothioate; note = thymine; note = sugar modification: 2'-O-methoxyethylribose
  modified_base 9: mod_base = OTHER; note = thymine; note = sugar modification: 2'-O-methoxyethylribose; note = backbone modification: 5'-phosphorothioate
  modified_base 10: mod_base = m5c; mod_base = OTHER; note = backbone modification: 5'-phosphorothioate; note = sugar modification: 2'-O-methoxyethylribose
  modified_base 11: mod_base = OTHER; note = thymine; note = backbone modification: 5'-phosphorothioate; note = sugar modification: 2'-O-methoxyethylribose
  modified_base 12: mod_base = OTHER; note = thymine; note = backbone modification: 5'-phosphorothioate; note = sugar modification: 2'-O-methoxyethylribose
  modified_base 13: mod_base = OTHER; note = sugar modification: 2'-O-methoxyethylribose; note = thymine; note = backbone modification: 5'-phosphorothioate
  modified_base 14: mod_base = m5c; mod_base = OTHER; note = sugar modification: 2'-O-methoxyethylribose; note = backbone modification: 5'-phosphorothioate
  modified_base 15: mod_base = OTHER; note = backbone modification: 5'-phosphorothioate; note = sugar modification: 2'-O-methoxyethylribose
  modified_base 16: mod_base = OTHER; note = sugar modification: 2'-O-methoxyethylribose; note = backbone modification: 5'-phosphorothioate
  modified_base 17: mod_base = m5c; mod_base = OTHER; note = sugar modification: lna; note = backbone modification: 5'-phosphorothioate
  modified_base 18: mod_base = OTHER; note = thymine; note = sugar modification: lna
ttctgaattctttcaact

SEQ ID NO: 1300 - RNA, 19 nt, synthetic construct
  source 1..19: mol_type = other RNA; note = Antisense oligonucleotide
  modified_base 1: mod_base = OTHER; note = sugar modification: 2'-O-methoxyethylribose; note = backbone modification: 5'-phosphorothioate
  modified_base 2: mod_base = OTHER; note = thymine; note = sugar modification: 2'-O-methoxyethylribose; note = backbone modification: 5'-phosphorothioate
  modified_base 3: mod_base = OTHER; note = sugar modification: 2'-O-methoxyethylribose; note = thymine; note = backbone modification: 5'-phosphorothioate
  modified_base 4: mod_base = OTHER; mod_base = m5c; note = backbone modification: 5'-phosphorothioate; note = sugar modification: 2'-O-methoxyethylribose
  modified_base 5: mod_base = OTHER; note = sugar modification: 2'-O-methoxyethylribose; note = thymine; note = backbone modification: 5'-phosphorothioate
  modified_base 6: mod_base = OTHER; note = backbone modification: 5'-phosphorothioate; note = sugar modification: 2'-O-methoxyethylribose
  modified_base 7: mod_base = OTHER; note = backbone modification: 5'-phosphorothioate; note = sugar modification: 2'-O-methoxyethylribose
  modified_base 8: mod_base = OTHER; note = backbone modification: 5'-phosphorothioate; note = sugar modification: 2'-O-methoxyethylribose
  modified_base 9: mod_base = OTHER; note = backbone modification: 5'-phosphorothioate; note = thymine; note = sugar modification: 2'-O-methoxyethylribose
  modified_base 10: mod_base = OTHER; note = backbone modification: 5'-phosphorothioate; note = thymine; note = sugar modification: 2'-O-methoxyethylribose
  modified_base 11: mod_base = m5c; mod_base = OTHER; note = backbone modification: 5'-phosphorothioate; note = sugar modification: 2'-O-methoxyethylribose
  modified_base 12: mod_base = OTHER; note = backbone modification: 5'-phosphorothioate; note = sugar modification: 2'-O-methoxyethylribose; note = thymine
  modified_base 13: mod_base = OTHER; note = thymine; note = backbone modification: 5'-phosphorothioate; note = sugar modification: 2'-O-methoxyethylribose
  modified_base 14: mod_base = OTHER; note = backbone modification: 5'-phosphorothioate; note = sugar modification: 2'-O-methoxyethylribose; note = thymine
  modified_base 15: mod_base = m5c; mod_base = OTHER; note = backbone modification: 5'-phosphorothioate; note = sugar modification: 2'-O-methoxyethylribose
  modified_base 16: mod_base = OTHER; note = sugar modification: 2'-O-methoxyethylribose; note = backbone modification: 5'-phosphorothioate
  modified_base 17: mod_base = OTHER; note = backbone modification: 5'-phosphorothioate; note = sugar modification: 2'-O-methoxyethylribose
  modified_base 18: mod_base = m5c; mod_base = OTHER; note = sugar modification: 2'-O-methoxyethylribose; note = backbone modification: 5'-phosphorothioate
  modified_base 19: mod_base = OTHER; note = sugar modification: 2'-O-methoxyethylribose; note = thymine
attctgaattctttcaact

SEQ ID NO: 1301 - RNA, 20 nt, synthetic construct
  source 1..20: mol_type = other RNA; note = Antisense oligonucleotide
  modified_base 1: mod_base = OTHER; note = backbone modification: 5'-phosphorothioate; note = sugar modification: 2'-O-methoxyethylribose
  modified_base 2: mod_base = OTHER; note = sugar modification: 2'-O-methoxyethylribose; note = backbone modification: 5'-phosphorothioate
  modified_base 3: mod_base = OTHER; note = thymine; note = backbone modification: 5'-phosphorothioate; note = sugar modification: 2'-O-methoxyethylribose
  modified_base 4: mod_base = OTHER; note = thymine; note = backbone modification: 5'-phosphorothioate; note = sugar modification: 2'-O-methoxyethylribose
  modified_base 5: mod_base = OTHER; mod_base = m5c; note = backbone modification: 5'-phosphorothioate; note = sugar modification: 2'-O-methoxyethylribose
  modified_base 6: mod_base = OTHER; note = thymine; note = backbone modification: 5'-phosphorothioate; note = sugar modification: 2'-O-methoxyethylribose
  modified_base 7: mod_base = OTHER; note = backbone modification: 5'-phosphorothioate; note = sugar modification: 2'-O-methoxyethylribose
  modified_base 8: mod_base = OTHER; note = backbone modification: 5'-phosphorothioate; note = sugar modification: 2'-O-methoxyethylribose
  modified_base 9: mod_base = OTHER; note = backbone modification: 5'-phosphorothioate; note = sugar modification: 2'-O-methoxyethylribose
  modified_base 10: mod_base = OTHER; note = backbone modification: 5'-phosphorothioate; note = sugar modification: 2'-O-methoxyethylribose; note = thymine
  modified_base 11: mod_base = OTHER; note = sugar modification: 2'-O-methoxyethylribose; note = backbone modification: 5'-phosphorothioate; note = thymine
  modified_base 12: mod_base = m5c; mod_base = OTHER; note = sugar modification: 2'-O-methoxyethylribose; note = backbone modification: 5'-phosphorothioate
  modified_base 13: mod_base = OTHER; note = thymine; note = sugar modification: 2'-O-methoxyethylribose; note = backbone modification: 5'-phosphorothioate
  modified_base 14: mod_base = OTHER; note = sugar modification: 2'-O-methoxyethylribose; note = backbone modification: 5'-phosphorothioate; note = thymine
  modified_base 15: mod_base = OTHER; note = sugar modification: 2'-O-methoxyethylribose; note = thymine; note = backbone modification: 5'-phosphorothioate
  modified_base 16: mod_base = OTHER; mod_base = m5c; note = backbone modification: 5'-phosphorothioate; note = sugar modification: 2'-O-methoxyethylribose
  modified_base 17: mod_base = OTHER; note = backbone modification: 5'-phosphorothioate; note = sugar modification: 2'-O-methoxyethylribose
  modified_base 18: mod_base = OTHER; note = backbone modification: 5'-phosphorothioate; note = sugar modification: 2'-O-methoxyethylribose
  modified_base 19: mod_base = m5c; mod_base = OTHER; note = sugar modification: 2'-O-methoxyethylribose; note = backbone modification: 5'-phosphorothioate
  modified_base 20: mod_base = OTHER; note = sugar modification: 2'-O-methoxyethylribose; note = thymine
gattctgaattctttcaact

SEQ ID NO: 1302 - RNA, 21 nt, synthetic construct
  source 1..21: mol_type = other RNA; note = Antisense oligonucleotide
  modified_base 1: mod_base = OTHER; note = backbone modification: 5'-phosphorothioate; note = thymine; note = sugar modification: 2'-O-methoxyethylribose
  modified_base 2: mod_base = OTHER; note = backbone modification: 5'-phosphorothioate; note = sugar modification: 2'-O-methoxyethylribose
  modified_base 3: mod_base = OTHER; note = sugar modification: 2'-O-methoxyethylribose; note = backbone modification: 5'-phosphorothioate
  modified_base 4: mod_base = OTHER; note = thymine; note = sugar modification: 2'-O-methoxyethylribose; note = backbone modification: 5'-phosphorothioate
  modified_base 5: mod_base = OTHER; note = thymine; note = backbone modification: 5'-phosphorothioate; note = sugar modification: 2'-O-methoxyethylribose
  modified_base 6: mod_base = OTHER; mod_base = m5c; note = sugar modification: 2'-O-methoxyethylribose; note = backbone modification: 5'-phosphorothioate
  modified_base 7: mod_base = OTHER; note = sugar modification: 2'-O-methoxyethylribose; note = thymine; note = backbone modification: 5'-phosphorothioate
  modified_base 8: mod_base = OTHER; note = sugar modification: 2'-O-methoxyethylribose; note = backbone modification: 5'-phosphorothioate
  modified_base 9: mod_base = OTHER; note = backbone modification: 5'-phosphorothioate; note = sugar modification: 2'-O-methoxyethylribose
  modified_base 10: mod_base = OTHER; note = backbone modification: 5'-phosphorothioate; note = sugar modification: 2'-O-methoxyethylribose
  modified_base 11: mod_base = OTHER; note = sugar modification: 2'-O-methoxyethylribose; note = thymine; note = backbone modification: 5'-phosphorothioate
  modified_base 12: mod_base = OTHER; note = thymine; note = sugar modification: 2'-O-methoxyethylribose; note = backbone modification: 5'-phosphorothioate
  modified_base 13: mod_base = OTHER; mod_base = m5c; note = sugar modification: 2'-O-methoxyethylribose; note = backbone modification: 5'-phosphorothioate
  modified_base 14: mod_base = OTHER; note = backbone modification: 5'-phosphorothioate; note = sugar modification: 2'-O-methoxyethylribose; note = thymine
  modified_base 15: mod_base = OTHER; note = backbone modification: 5'-phosphorothioate; note = thymine; note = sugar modification: 2'-O-methoxyethylribose
  modified_base 16: mod_base = OTHER; note = backbone modification: 5'-phosphorothioate; note = sugar modification: 2'-O-methoxyethylribose; note = thymine
  modified_base 17: mod_base = m5c; mod_base = OTHER; note = sugar modification: 2'-O-methoxyethylribose; note = backbone modification: 5'-phosphorothioate
  modified_base 18: mod_base = OTHER; note = sugar modification: 2'-O-methoxyethylribose; note = backbone modification: 5'-phosphorothioate
  modified_base 19: mod_base = OTHER; note = backbone modification: 5'-phosphorothioate; note = sugar modification: 2'-O-methoxyethylribose
  modified_base 20: mod_base = m5c; mod_base = OTHER; note = sugar modification: 2'-O-methoxyethylribose; note = backbone modification: 5'-phosphorothioate
  modified_base 21: mod_base = OTHER; note = thymine; note = sugar modification: 2'-O-methoxyethylribose
tgattctgaattctttcaact

SEQ ID NO: 1303 - RNA, 22 nt, synthetic construct
  source 1..22: mol_type = other RNA; note = Antisense oligonucleotide
  modified_base 1: mod_base = OTHER; mod_base = m5c; note = backbone modification: 5'-phosphorothioate; note = sugar modification: 2'-O-methoxyethylribose
  modified_base 2: mod_base = OTHER; note = backbone modification: 5'-phosphorothioate; note = thymine; note = sugar modification: 2'-O-methoxyethylribose
  modified_base 3: mod_base = OTHER; note = backbone modification: 5'-phosphorothioate; note = sugar modification: 2'-O-methoxyethylribose
  modified_base 4: mod_base = OTHER; note = backbone modification: 5'-phosphorothioate; note = sugar modification: 2'-O-methoxyethylribose
  modified_base 5: mod_base = OTHER; note = thymine; note = sugar modification: 2'-O-methoxyethylribose; note = backbone modification: 5'-phosphorothioate
  modified_base 6: mod_base = OTHER; note = backbone modification: 5'-phosphorothioate; note = thymine; note = sugar modification: 2'-O-methoxyethylribose
  modified_base 7: mod_base = OTHER; mod_base = m5c; note = backbone modification: 5'-phosphorothioate; note = sugar modification: 2'-O-methoxyethylribose
  modified_base 8: mod_base = OTHER; note = sugar modification: 2'-O-methoxyethylribose; note = thymine; note = backbone modification: 5'-phosphorothioate
  modified_base 9: mod_base = OTHER; note = backbone modification: 5'-phosphorothioate; note = sugar modification: 2'-O-methoxyethylribose
  modified_base 10: mod_base = OTHER; note = sugar modification: 2'-O-methoxyethylribose; note = backbone modification: 5'-phosphorothioate
  modified_base 11: mod_base = OTHER; note = backbone modification: 5'-phosphorothioate; note = sugar modification: 2'-O-methoxyethylribose
  modified_base 12: mod_base = OTHER; note = backbone modification: 5'-phosphorothioate; note = sugar modification: 2'-O-methoxyethylribose; note = thymine
  modified_base 13: mod_base = OTHER; note = thymine; note = backbone modification: 5'-phosphorothioate; note = sugar modification: 2'-O-methoxyethylribose
  modified_base 14: mod_base = OTHER; mod_base = m5c; note = backbone modification: 5'-phosphorothioate; note = sugar modification: 2'-O-methoxyethylribose
  modified_base 15: mod_base = OTHER; note = backbone modification: 5'-phosphorothioate; note = thymine; note = sugar modification: 2'-O-methoxyethylribose
  modified_base 16: mod_base = OTHER; note = backbone modification: 5'-phosphorothioate; note = sugar modification: 2'-O-methoxyethylribose; note = thymine
  modified_base 17: mod_base = OTHER; note = backbone modification: 5'-phosphorothioate; note = thymine; note = sugar modification: 2'-O-methoxyethylribose
  modified_base 18: mod_base = OTHER; mod_base = m5c; note = sugar modification: 2'-O-methoxyethylribose; note = backbone modification: 5'-phosphorothioate
  modified_base 19: mod_base = OTHER; note = sugar modification: 2'-O-methoxyethylribose; note = backbone modification: 5'-phosphorothioate
  modified_base 20: mod_base = OTHER; note = sugar modification: 2'-O-methoxyethylribose; note = backbone modification: 5'-phosphorothioate
  modified_base 21: mod_base = m5c; mod_base = OTHER; note = backbone modification: 5'-phosphorothioate; note = sugar modification: 2'-O-methoxyethylribose
  modified_base 22: mod_base = OTHER; note = sugar modification: 2'-O-methoxyethylribose; note = thymine
ctgattctgaattctttcaact

SEQ ID NO: 1304 - RNA, 18 nt, synthetic construct
  source 1..18: mol_type = other RNA; note = Antisense oligonucleotide
  modified_base 1: mod_base = OTHER; note = sugar modification: lna; note = backbone modification: 5'-phosphorothioate
  modified_base 2: mod_base = OTHER; note = thymine; note = backbone modification: 5'-phosphorothioate; note = sugar modification: 2'-O-methoxyethylribose
  modified_base 3: mod_base = OTHER; note = thymine; note = backbone modification: 5'-phosphorothioate; note = sugar modification: 2'-O-methoxyethylribose
  modified_base 4: mod_base = OTHER; mod_base = m5c; note = backbone modification: 5'-phosphorothioate; note = sugar modification: 2'-O-methoxyethylribose
  modified_base 5: mod_base = OTHER; note = thymine; note = backbone modification: 5'-phosphorothioate; note = sugar modification: 2'-O-methoxyethylribose
  modified_base 6: mod_base = OTHER; note = backbone modification: 5'-phosphorothioate; note = sugar modification: 2'-O-methoxyethylribose
  modified_base 7: mod_base = OTHER; note = sugar modification: 2'-O-methoxyethylribose; note = backbone modification: 5'-phosphorothioate
  modified_base 8: mod_base = OTHER; note = sugar modification: 2'-O-methoxyethylribose; note = backbone modification: 5'-phosphorothioate
  modified_base 9: mod_base = OTHER; note = sugar modification: 2'-O-methoxyethylribose; note = thymine; note = backbone modification: 5'-phosphorothioate
  modified_base 10: mod_base = OTHER; note = sugar modification: 2'-O-methoxyethylribose; note = backbone modification: 5'-phosphorothioate; note = thymine
  modified_base 11: mod_base = OTHER; mod_base = m5c; note = backbone modification: 5'-phosphorothioate; note = sugar modification: 2'-O-methoxyethylribose
  modified_base 12: mod_base = OTHER; note = sugar modification: 2'-O-methoxyethylribose; note = backbone modification: 5'-phosphorothioate; note = thymine
  modified_base 13: mod_base = OTHER; note = backbone modification: 5'-phosphorothioate; note = sugar modification: 2'-O-methoxyethylribose; note = thymine
  modified_base 14: mod_base = OTHER; note = thymine; note = backbone modification: 5'-phosphorothioate; note = sugar modification: 2'-O-methoxyethylribose
  modified_base 15: mod_base = m5c; mod_base = OTHER; note = backbone modification: 5'-phosphorothioate; note = sugar modification: 2'-O-methoxyethylribose
  modified_base 16: mod_base = OTHER; note = backbone modification: 5'-phosphorothioate; note = sugar modification: 2'-O-methoxyethylribose
  modified_base 17: mod_base = OTHER; note = sugar modification: 2'-O-methoxyethylribose; note = backbone modification: 5'-phosphorothioate
  modified_base 18: mod_base = m5c; mod_base = OTHER; note = sugar modification: lna
attctgaattctttcaac

SEQ ID NO: 1305 - RNA, 18 nt, synthetic construct
  source 1..18: mol_type = other RNA; note = Antisense oligonucleotide
  modified_base 1: mod_base = OTHER; note = sugar modification: lna; note = backbone modification: 5'-phosphorothioate
  modified_base 2: mod_base = OTHER; note = sugar modification: lna; note = backbone modification: 5'-phosphorothioate; note = thymine
  modified_base 3: mod_base = OTHER; note = backbone modification: 5'-phosphorothioate; note = thymine; note = sugar modification: 2'-O-methoxyethylribose
  modified_base 4: mod_base = m5c; mod_base = OTHER; note = backbone modification: 5'-phosphorothioate; note = sugar modification: 2'-O-methoxyethylribose
  modified_base 5: mod_base = OTHER; note = backbone modification: 5'-phosphorothioate; note = sugar modification: 2'-O-methoxyethylribose; note = thymine
  modified_base 6: mod_base = OTHER; note = backbone modification: 5'-phosphorothioate; note = sugar modification: 2'-O-methoxyethylribose
  modified_base 7: mod_base = OTHER; note = backbone modification: 5'-phosphorothioate; note = sugar modification: 2'-O-methoxyethylribose
  modified_base 8: mod_base = OTHER; note = backbone modification: 5'-phosphorothioate; note = sugar modification: 2'-O-methoxyethylribose
  modified_base 9: mod_base = OTHER; note = backbone modification: 5'-phosphorothioate; note = sugar modification: 2'-O-methoxyethylribose; note = thymine
  modified_base 10: mod_base = OTHER; note = backbone modification: 5'-phosphorothioate; note = thymine; note = sugar modification: 2'-O-methoxyethylribose
  modified_base 11: mod_base = OTHER; mod_base = m5c; note = sugar modification: 2'-O-methoxyethylribose; note = backbone modification: 5'-phosphorothioate
  modified_base 12: mod_base = OTHER; note = sugar modification: 2'-O-methoxyethylribose; note = thymine; note = backbone modification: 5'-phosphorothioate
  modified_base 13: mod_base = OTHER; note = sugar modification: 2'-O-methoxyethylribose; note = backbone modification: 5'-phosphorothioate; note = thymine
  modified_base 14: mod_base = OTHER; note = thymine; note = sugar modification: 2'-O-methoxyethylribose; note = backbone modification: 5'-phosphorothioate
  modified_base 15: mod_base = OTHER; mod_base = m5c; note = backbone modification: 5'-phosphorothioate; note = sugar modification: 2'-O-methoxyethylribose
  modified_base 16: mod_base = OTHER; note = sugar modification: 2'-O-methoxyethylribose; note = backbone modification: 5'-phosphorothioate
  modified_base 17: mod_base = OTHER; note = backbone modification: 5'-phosphorothioate; note = sugar modification: lna
  modified_base 18: mod_base = OTHER; mod_base = m5c; note = sugar modification: lna
attctgaattctttcaac

SEQ ID NO: 1306 - RNA, 19 nt, synthetic construct
  source 1..19: mol_type = other RNA; note = Antisense oligonucleotide
  modified_base 1: mod_base = OTHER; note = sugar modification: 2'-O-methoxyethylribose; note = backbone modification: 5'-phosphorothioate
  modified_base 2: mod_base = OTHER; note = backbone modification: 5'-phosphorothioate; note = sugar modification: 2'-O-methoxyethylribose
  modified_base 3: mod_base = OTHER; note = sugar modification: 2'-O-methoxyethylribose; note = backbone modification: 5'-phosphorothioate; note = thymine
  modified_base 4: mod_base = OTHER; note = sugar modification: 2'-O-methoxyethylribose; note = thymine; note = backbone modification: 5'-phosphorothioate
  modified_base 5: mod_base = OTHER; mod_base = m5c; note = sugar modification: 2'-O-methoxyethylribose; note = backbone modification: 5'-phosphorothioate
  modified_base 6: mod_base = OTHER; note = sugar modification: 2'-O-methoxyethylribose; note = thymine; note = backbone modification: 5'-phosphorothioate
  modified_base 7: mod_base = OTHER; note = sugar modification: 2'-O-methoxyethylribose; note = backbone modification: 5'-phosphorothioate
  modified_base 8: mod_base = OTHER; note = sugar modification: 2'-O-methoxyethylribose; note = backbone modification: 5'-phosphorothioate
  modified_base 9: mod_base = OTHER; note = sugar modification: 2'-O-methoxyethylribose; note = backbone modification: 5'-phosphorothioate
  modified_base 10: mod_base = OTHER; note = backbone modification: 5'-phosphorothioate; note = thymine; note = sugar modification: 2'-O-methoxyethylribose
  modified_base 11: mod_base = OTHER; note = sugar modification: 2'-O-methoxyethylribose; note = thymine; note = backbone modification: 5'-phosphorothioate
  modified_base 12: mod_base = m5c; mod_base = OTHER; note = backbone modification: 5'-phosphorothioate; note = sugar modification: 2'-O-methoxyethylribose
  modified_base 13: mod_base = OTHER; note = backbone modification: 5'-phosphorothioate; note = thymine; note = sugar modification: 2'-O-methoxyethylribose
  modified_base 14: mod_base = OTHER; note = sugar modification: 2'-O-methoxyethylribose; note = thymine; note = backbone modification: 5'-phosphorothioate
  modified_base 15: mod_base = OTHER; note = sugar modification: 2'-O-methoxyethylribose; note = backbone modification: 5'-phosphorothioate; note = thymine
  modified_base 16: mod_base = OTHER; mod_base = m5c; note = sugar modification: 2'-O-methoxyethylribose; note = backbone modification: 5'-phosphorothioate
  modified_base 17: mod_base = OTHER; note = sugar modification: 2'-O-methoxyethylribose; note = backbone modification: 5'-phosphorothioate
  modified_base 18: mod_base = OTHER; note = sugar modification: 2'-O-methoxyethylribose; note = backbone modification: 5'-phosphorothioate
  modified_base 19: mod_base = m5c; mod_base = OTHER; note = sugar modification: 2'-O-methoxyethylribose
gattctgaattctttcaac

SEQ ID NO: 1307 - RNA, 20 nt, synthetic construct
  source 1..20: mol_type = other RNA; note = Antisense oligonucleotide
  modified_base 1: mod_base = OTHER; note = thymine; note = sugar modification: 2'-O-methoxyethylribose; note = backbone modification: 5'-phosphorothioate
  modified_base 2: mod_base = OTHER; note = sugar modification: 2'-O-methoxyethylribose; note = backbone modification: 5'-phosphorothioate
  modified_base 3: mod_base = OTHER; note = sugar modification: 2'-O-methoxyethylribose; note = backbone modification: 5'-phosphorothioate
  modified_base 4: mod_base = OTHER; note = backbone modification: 5'-phosphorothioate; note = thymine; note = sugar modification: 2'-O-methoxyethylribose
  modified_base 5: mod_base = OTHER; note = thymine; note = sugar modification: 2'-O-methoxyethylribose; note = backbone modification: 5'-phosphorothioate
  modified_base 6: mod_base = OTHER; mod_base = m5c; note = backbone modification: 5'-phosphorothioate; note = sugar modification: 2'-O-methoxyethylribose
  modified_base 7: mod_base = OTHER; note = backbone modification: 5'-phosphorothioate; note = sugar modification: 2'-O-methoxyethylribose; note = thymine
  modified_base 8: mod_base = OTHER; note = sugar modification: 2'-O-methoxyethylribose; note = backbone modification: 5'-phosphorothioate
  modified_base 9: mod_base = OTHER; note = backbone modification: 5'-phosphorothioate; note = sugar modification: 2'-O-methoxyethylribose
  modified_base 10: mod_base = OTHER; note = sugar modification: 2'-O-methoxyethylribose; note = backbone modification: 5'-phosphorothioate
  modified_base 11: mod_base = OTHER; note = thymine; note = backbone modification: 5'-phosphorothioate; note = sugar modification: 2'-O-methoxyethylribose
  modified_base 12: mod_base = OTHER; note = thymine; note = backbone modification: 5'-phosphorothioate; note = sugar modification: 2'-O-methoxyethylribose
  modified_base 13: mod_base = OTHER; mod_base = m5c; note = sugar modification: 2'-O-methoxyethylribose; note = backbone modification: 5'-phosphorothioate
  modified_base 14: mod_base = OTHER; note = backbone modification: 5'-phosphorothioate; note = sugar modification: 2'-O-methoxyethylribose; note = thymine
  modified_base 15: mod_base = OTHER; note = backbone modification: 5'-phosphorothioate; note = sugar modification: 2'-O-methoxyethylribose; note = thymine
  modified_base 16: mod_base = OTHER; note = thymine; note = backbone modification: 5'-phosphorothioate; note = sugar modification: 2'-O-methoxyethylribose
  modified_base 17: mod_base = OTHER; mod_base = m5c; note = backbone modification: 5'-phosphorothioate; note = sugar modification: 2'-O-methoxyethylribose
  modified_base 18: mod_base = OTHER; note = backbone modification: 5'-phosphorothioate; note = sugar modification: 2'-O-methoxyethylribose
  modified_base 19: mod_base = OTHER; note = sugar modification: 2'-O-methoxyethylribose; note = backbone modification: 5'-phosphorothioate
  modified_base 20: mod_base = m5c; mod_base = OTHER; note = sugar modification: 2'-O-methoxyethylribose
tgattctgaattctttcaac

SEQ ID NO: 1308 - RNA, 21 nt, synthetic construct
  source 1..21: mol_type = other RNA; note = Antisense oligonucleotide
  modified_base 1: mod_base = OTHER; mod_base = m5c; note = backbone modification: 5'-phosphorothioate; note = sugar modification: 2'-O-methoxyethylribose
  modified_base 2: mod_base = OTHER; note = backbone modification: 5'-phosphorothioate; note = sugar modification: 2'-O-methoxyethylribose; note = thymine
  modified_base 3: mod_base = OTHER; note = sugar modification: 2'-O-methoxyethylribose; note = backbone modification: 5'-phosphorothioate
  modified_base 4: mod_base = OTHER; note = sugar modification: 2'-O-methoxyethylribose; note = backbone modification: 5'-phosphorothioate
  modified_base 5: mod_base = OTHER; note = thymine; note = sugar modification: 2'-O-methoxyethylribose; note = backbone modification: 5'-phosphorothioate
  modified_base 6: mod_base = OTHER; note = sugar modification: 2'-O-methoxyethylribose; note = thymine; note = backbone modification: 5'-phosphorothioate
  modified_base 7: mod_base = OTHER; mod_base = m5c; note = sugar modification: 2'-O-methoxyethylribose; note = backbone modification: 5'-phosphorothioate
  modified_base 8: mod_base = OTHER; note = backbone modification: 5'-phosphorothioate; note = sugar modification: 2'-O-methoxyethylribose; note = thymine
  modified_base 9: mod_base = OTHER; note = sugar modification: 2'-O-methoxyethylribose; note = backbone modification: 5'-phosphorothioate
  modified_base 10: mod_base = OTHER; note = sugar modification: 2'-O-methoxyethylribose; note = backbone modification: 5'-phosphorothioate
  modified_base 11: mod_base = OTHER; note = sugar modification: 2'-O-methoxyethylribose; note = backbone modification: 5'-phosphorothioate
  modified_base 12: mod_base = OTHER; note = sugar modification: 2'-O-methoxyethylribose; note = thymine; note = backbone modification: 5'-phosphorothioate
  modified_base 13: mod_base = OTHER; note = sugar modification: 2'-O-methoxyethylribose; note = backbone modification: 5'-phosphorothioate; note = thymine
  modified_base 14: mod_base = m5c; mod_base = OTHER; note = sugar modification: 2'-O-methoxyethylribose; note = backbone modification: 5'-phosphorothioate
  modified_base 15: mod_base = OTHER; note = sugar modification: 2'-O-methoxyethylribose; note = backbone modification: 5'-phosphorothioate; note = thymine
  modified_base 16: mod_base = OTHER; note = thymine; note = backbone modification: 5'-phosphorothioate; note = sugar modification: 2'-O-methoxyethylribose
  modified_base 17: mod_base = OTHER; note = sugar modification: 2'-O-methoxyethylribose; note = backbone modification: 5'-phosphorothioate; note = thymine
  modified_base 18: mod_base = m5c; mod_base = OTHER; note = backbone modification: 5'-phosphorothioate; note = sugar modification: 2'-O-methoxyethylribose
  modified_base 19: mod_base = OTHER; note = backbone modification: 5'-phosphorothioate; note = sugar modification: 2'-O-methoxyethylribose
  modified_base 20: mod_base = OTHER; note = sugar modification: 2'-O-methoxyethylribose; note = backbone modification: 5'-phosphorothioate
  modified_base 21: mod_base = m5c; mod_base = OTHER; note = sugar modification: 2'-O-methoxyethylribose
ctgattctgaattctttcaac

SEQ ID NO: 1309 - RNA, 22 nt, synthetic construct
  source 1..22: mol_type = other RNA; note = Antisense oligonucleotide
  modified_base 1: mod_base = OTHER; note = sugar modification: 2'-O-methoxyethylribose; note = backbone modification: 5'-phosphorothioate
  modified_base 2: mod_base = OTHER; mod_base = m5c; note = sugar modification: 2'-O-methoxyethylribose; note = backbone modification: 5'-phosphorothioate
  modified_base 3: mod_base = OTHER; note = backbone modification: 5'-phosphorothioate; note = sugar modification: 2'-O-methoxyethylribose; note = thymine
  modified_base 4: mod_base = OTHER; note = sugar modification: 2'-O-methoxyethylribose; note = backbone modification: 5'-phosphorothioate
  modified_base 5: mod_base = OTHER; note = sugar modification: 2'-O-methoxyethylribose; note = backbone modification: 5'-phosphorothioate
  modified_base 6: mod_base = OTHER; note = sugar modification: 2'-O-methoxyethylribose; note = thymine; note = backbone modification: 5'-phosphorothioate
  modified_base 7: mod_base = OTHER; note = backbone modification: 5'-phosphorothioate; note = thymine; note = sugar modification: 2'-O-methoxyethylribose
  modified_base 8: mod_base = m5c; mod_base = OTHER; note = backbone modification: 5'-phosphorothioate; note = sugar modification: 2'-O-methoxyethylribose
  modified_base 9: mod_base = OTHER; note = backbone modification: 5'-phosphorothioate; note = sugar modification: 2'-O-methoxyethylribose; note = thymine
  modified_base 10: mod_base = OTHER; note = sugar modification: 2'-O-methoxyethylribose; note = backbone modification: 5'-phosphorothioate
  modified_base 11: mod_base = OTHER; note = backbone modification: 5'-phosphorothioate; note = sugar modification: 2'-O-methoxyethylribose
  modified_base 12: mod_base = OTHER; note = sugar modification: 2'-O-methoxyethylribose; note = backbone modification: 5'-phosphorothioate
  modified_base 13: mod_base = OTHER; note = thymine; note = backbone modification: 5'-phosphorothioate; note = sugar modification: 2'-O-methoxyethylribose
  modified_base 14: mod_base = OTHER; note = sugar modification: 2'-O-methoxyethylribose; note = thymine; note = backbone modification: 5'-phosphorothioate
  modified_base 15: mod_base = m5c; mod_base = OTHER; note = backbone modification: 5'-phosphorothioate; note = sugar modification: 2'-O-methoxyethylribose
  modified_base 16: mod_base = OTHER; note = backbone modification: 5'-phosphorothioate; note = thymine; note = sugar modification: 2'-O-methoxyethylribose
  modified_base 17: mod_base = OTHER; note = sugar modification: 2'-O-methoxyethylribose; note = thymine; note = backbone modification: 5'-phosphorothioate
  modified_base 18: mod_base = OTHER; note = backbone modification: 5'-phosphorothioate; note = thymine; note = sugar modification: 2'-O-methoxyethylribose
  modified_base 19: mod_base = OTHER; mod_base = m5c; note = sugar modification: 2'-O-methoxyethylribose; note = backbone modification: 5'-phosphorothioate
  modified_base 20: mod_base = OTHER; note = backbone modification: 5'-phosphorothioate; note = sugar modification: 2'-O-methoxyethylribose
  modified_base 21: mod_base = OTHER; note = backbone modification: 5'-phosphorothioate; note = sugar modification: 2'-O-methoxyethylribose
  modified_base 22: mod_base = m5c; mod_base = OTHER; note = sugar modification: 2'-O-methoxyethylribose
actgattctgaattctttcaac

SEQ ID NO: 1310 - RNA, 18 nt, synthetic construct
  source 1..18: mol_type = other RNA; note = Antisense oligonucleotide
  modified_base 1: mod_base = OTHER; note = thymine; note = sugar modification: lna; note = backbone modification: 5'-phosphorothioate
  modified_base 2: mod_base = OTHER; note = backbone modification: 5'-phosphorothioate; note = sugar modification: lna
  modified_base 3: mod_base = OTHER; note = thymine; note = sugar modification: 2'-O-methoxyethylribose; note = backbone modification: 5'-phosphorothioate
  modified_base 4: mod_base = OTHER; note = backbone modification: 5'-phosphorothioate; note = sugar modification: 2-fluororibose; note = thymine
  modified_base 5: mod_base = m5c; mod_base = OTHER; note = sugar modification: 2-fluororibose; note = backbone modification: 5'-phosphorothioate
  modified_base 6: mod_base = OTHER; note = thymine; note = backbone modification: 5'-phosphorothioate; note = sugar modification: 2-fluororibose
  modified_base 7: mod_base = OTHER; note = thymine; note = backbone modification: 5'-phosphorothioate; note = sugar modification: 2-fluororibose
  modified_base 8: mod_base = OTHER; note = sugar modification: 2'-O-methoxyethylribose; note = backbone modification: 5'-phosphorothioate
  modified_base 9: mod_base = OTHER; note = thymine; note = sugar modification: 2-fluororibose; note = backbone modification: 5'-phosphorothioate
  modified_base 10: mod_base = OTHER; note = backbone modification: 5'-phosphorothioate; note = sugar modification: 2-fluororibose
  modified_base 11: mod_base = m5c; mod_base = OTHER; note = sugar modification: 2'-O-methoxyethylribose; note = backbone modification: 5'-phosphorothioate
  modified_base 12: mod_base = OTHER; note = sugar modification: 2-fluororibose; note = backbone modification: 5'-phosphorothioate; note = thymine
  modified_base 13: mod_base = OTHER; note = thymine; note = sugar modification: 2-fluororibose; note = backbone modification: 5'-phosphorothioate
  modified_base 14: mod_base = OTHER; mod_base = m5c; note = backbone modification: 5'-phosphorothioate; note = sugar modification: 2-fluororibose
  modified_base 15: mod_base = OTHER; note = backbone modification: 5'-phosphorothioate; note = sugar modification: 2-fluororibose
  modified_base 16: mod_base = OTHER; note = sugar modification: 2'-O-methoxyethylribose; note = backbone modification: 5'-phosphorothioate; note = thymine
  modified_base 17: mod_base = OTHER; mod_base = m5c; note = backbone modification: 5'-phosphorothioate; note = sugar modification: lna
  modified_base 18: mod_base = OTHER; mod_base = m5c; note = sugar modification: lna
tgttcttgtacttcatcc

SEQ ID NO: 1311 - RNA, 18 nt, synthetic construct
  source 1..18: mol_type = other RNA; note = Antisense oligonucleotide
  modified_base 1: mod_base = OTHER; note = backbone modification: 5'-phosphorothioate; note = thymine; note = sugar modification: 2'-O-methoxyethylribose
  modified_base 2: mod_base = OTHER; note = sugar modification: 2'-O-methoxyethylribose; note = backbone modification: 5'-phosphorothioate
  modified_base 3: mod_base = OTHER; note = sugar modification: 2'-O-methoxyethylribose; note = thymine; note = backbone modification: 5'-phosphorothioate
  modified_base 4: mod_base = OTHER; note = sugar modification: 2-fluororibose; note = thymine; note = backbone modification: 5'-phosphorothioate
  modified_base 5: mod_base = m5c; mod_base = OTHER; note = backbone modification: 5'-phosphorothioate; note = sugar modification: 2-fluororibose
  modified_base 6: mod_base = OTHER; note = thymine; note = sugar modification: 2-fluororibose; note = backbone modification: 5'-phosphorothioate
  modified_base 7: mod_base = OTHER; note = thymine; note = sugar modification: 2-fluororibose; note = backbone modification: 5'-phosphorothioate
  modified_base 8: mod_base = OTHER; note = sugar modification: 2-fluororibose; note = backbone modification: 5'-phosphorothioate
  modified_base 9: mod_base = OTHER; note = sugar modification: 2'-O-methoxyethylribose; note = backbone modification: 5'-phosphorothioate; note = thymine
  modified_base 10: mod_base = OTHER; note = backbone modification: 5'-phosphorothioate; note = sugar modification: 2'-O-methoxyethylribose
  modified_base 11: mod_base = m5c; mod_base = OTHER; note = backbone modification: 5'-phosphorothioate; note = sugar modification: 2-fluororibose
  modified_base 12: mod_base = OTHER; note = backbone modification: 5'-phosphorothioate; note = thymine; note = sugar modification: 2-fluororibose
  modified_base 13: mod_base = OTHER; note = sugar modification: 2-fluororibose; note = thymine; note = backbone modification: 5'-phosphorothioate
  modified_base 14: mod_base = m5c; mod_base = OTHER; note = backbone modification: 5'-phosphorothioate; note = sugar modification: 2-fluororibose
  modified_base 15: mod_base = OTHER; note = backbone modification: 5'-phosphorothioate; note = sugar modification: 2-fluororibose
  modified_base 16: mod_base = OTHER; note = thymine; note = backbone modification: 5'-phosphorothioate; note = sugar modification: 2'-O-methoxyethylribose
  modified_base 17: mod_base = OTHER; mod_base = m5c; note = sugar modification: 2'-O-methoxyethylribose; note = backbone modification: 5'-phosphorothioate
  modified_base 18: mod_base = m5c; mod_base = OTHER; note = sugar modification: 2'-O-methoxyethylribose
tgttcttgtacttcatcc

SEQ ID NO: 1312 - RNA, 18 nt, synthetic construct
  source 1..18: mol_type = other RNA; note = Antisense oligonucleotide
  modified_base 1: mod_base = OTHER; note = backbone modification: 5'-phosphorothioate; note = sugar modification: lna; note = thymine
  modified_base 2: mod_base = OTHER; note = backbone modification: 5'-phosphorothioate; note = sugar modification: 2'-O-methoxyethylribose
  modified_base 3: mod_base = OTHER; note = backbone modification: 5'-phosphorothioate; note = sugar modification: 2'-O-methoxyethylribose; note = thymine
  modified_base 4: mod_base = OTHER; note = thymine; note = backbone modification: 5'-phosphorothioate; note = sugar modification: 2-fluororibose
  modified_base 5: mod_base = OTHER; mod_base = m5c; note = sugar modification: 2-fluororibose; note = backbone modification: 5'-phosphorothioate
  modified_base 6: mod_base = OTHER; note = thymine; note = sugar modification: 2-fluororibose; note = backbone modification: 5'-phosphorothioate
  modified_base 7: mod_base = OTHER; note = backbone modification: 5'-phosphorothioate; note = thymine; note = sugar modification: 2-fluororibose
  modified_base 8: mod_base = OTHER; note = backbone modification: 5'-phosphorothioate; note = sugar modification: 2-fluororibose
  modified_base 9: mod_base = OTHER; note = sugar modification: 2'-O-methoxyethylribose; note = thymine; note = backbone modification: 5'-phosphorothioate
  modified_base 10: mod_base = OTHER; note = backbone modification: 5'-phosphorothioate; note = sugar modification: 2'-O-methoxyethylribose
  modified_base 11: mod_base = OTHER; mod_base = m5c; note = backbone modification: 5'-phosphorothioate; note = sugar modification: 2-fluororibose
  modified_base 12: mod_base = OTHER; note = sugar modification: 2-fluororibose; note = thymine; note = backbone modification: 5'-phosphorothioate
  modified_base 13: mod_base = OTHER; note = thymine; note = backbone modification: 5'-phosphorothioate; note = sugar modification: 2-fluororibose
  modified_base 14: mod_base = OTHER; mod_base = m5c; note = backbone modification: 5'-phosphorothioate; note = sugar modification: 2-fluororibose
  modified_base 15: mod_base = OTHER; note = backbone modification: 5'-phosphorothioate; note = sugar modification: 2-fluororibose
  modified_base 16: mod_base = OTHER; note = thymine; note = sugar modification: 2'-O-methoxyethylribose; note = backbone modification: 5'-phosphorothioate
  modified_base 17: mod_base = m5c; mod_base = OTHER; note = backbone modification: 5'-phosphorothioate; note = sugar modification: 2'-O-methoxyethylribose
  modified_base 18: mod_base = OTHER; mod_base = m5c; note = sugar modification: lna
tgttcttgtacttcatcc

SEQ ID NO: 1313 - RNA, 18 nt, synthetic construct
  source 1..18: mol_type = other RNA; note = Antisense oligonucleotide
  modified_base 1: mod_base = OTHER; note = sugar modification: lna; note = backbone modification: 5'-phosphorothioate; note = thymine
  modified_base 2: mod_base = OTHER; note = backbone modification: 5'-phosphorothioate; note = sugar modification: lna
  modified_base 3: mod_base = OTHER; note = backbone modification: 5'-phosphorothioate; note = thymine; note = sugar modification: 2'-O-methoxyethylribose
  modified_base 4: mod_base = OTHER; note = sugar modification: 2-fluororibose; note = thymine; note = backbone modification: 5'-phosphorothioate
  modified_base 5: mod_base = m5c; mod_base = OTHER; note = backbone modification: 5'-phosphorothioate; note = sugar modification: 2-fluororibose
  modified_base 6: mod_base = OTHER; note = backbone modification: 5'-phosphorothioate; note = sugar modification: 2-fluororibose; note = thymine
  modified_base 7: mod_base = OTHER; note = thymine; note = sugar modification: 2-fluororibose; note = backbone modification: 5'-phosphorothioate
  modified_base 8: mod_base = OTHER; note = backbone modification: 5'-phosphorothioate; note = sugar modification: 2-fluororibose
  modified_base 9: mod_base = OTHER; note = backbone modification: 5'-phosphorothioate; note = thymine; note = sugar modification: 2'-O-methoxyethylribose
  modified_base 10: mod_base = OTHER; note = sugar modification: 2'-O-methoxyethylribose; note = backbone modification: 5'-phosphorothioate
  modified_base 11: mod_base = OTHER; mod_base = m5c; note = backbone modification: 5'-phosphorothioate; note = sugar modification: 2-fluororibose
  modified_base 12: mod_base = OTHER; note = thymine; note = sugar modification: 2-fluororibose; note = backbone modification: 5'-phosphorothioate
  modified_base 13: mod_base = OTHER; note = backbone modification: 5'-phosphorothioate; note = sugar modification: 2-fluororibose; note = thymine
  modified_base 14: mod_base = m5c; mod_base = OTHER; note = backbone modification: 5'-phosphorothioate; note = sugar modification: 2-fluororibose
  modified_base 15: mod_base = OTHER; note = backbone modification: 5'-phosphorothioate; note = sugar modification: 2-fluororibose
  modified_base 16: mod_base = OTHER; note = thymine; note = sugar modification: 2'-O-methoxyethylribose; note = backbone modification: 5'-phosphorothioate
  modified_base 17: mod_base = OTHER; mod_base = m5c; note = sugar modification: lna; note = backbone modification: 5'-phosphorothioate
  modified_base 18: mod_base = m5c; mod_base = OTHER; note = sugar modification: lna
tgttcttgtacttcatcc

SEQ ID NO: 1314 - RNA, 18 nt, synthetic construct
  source 1..18: mol_type = other RNA; note = Antisense oligonucleotide
  modified_base 1: mod_base = OTHER; note = sugar modification: lna; note = backbone modification: 5'-phosphorothioate; note = thymine
  modified_base 2: mod_base = OTHER; note = backbone modification: 5'-phosphorothioate; note = sugar modification: 2'-O-methoxyethylribose
  modified_base 3: mod_base = OTHER; note = sugar modification: 2-fluororibose; note = backbone modification: 5'-phosphorothioate; note = thymine
  modified_base 4: mod_base = OTHER; note = thymine; note = backbone modification: 5'-phosphorothioate; note = sugar modification: 2-fluororibose
  modified_base 5: mod_base = m5c; mod_base = OTHER; note = sugar modification: 2-fluororibose; note = backbone modification: 5'-phosphorothioate
  modified_base 6: mod_base = OTHER; note = thymine; note = sugar modification: 2-fluororibose; note = backbone modification: 5'-phosphorothioate
  modified_base 7: mod_base = OTHER; note = sugar modification: 2-fluororibose; note = thymine; note = backbone modification: 5'-phosphorothioate
  modified_base 8: mod_base = OTHER; note = sugar modification: 2-fluororibose; note = backbone modification: 5'-phosphorothioate
  modified_base 9: mod_base = OTHER; note = backbone modification: 5'-phosphorothioate; note = thymine; note = sugar modification: 2'-O-methoxyethylribose
  modified_base 10: mod_base = OTHER; note = sugar modification: 2'-O-methoxyethylribose; note = backbone modification: 5'-phosphorothioate
  modified_base 11: mod_base = OTHER; mod_base = m5c; note = backbone modification: 5'-phosphorothioate; note = sugar modification: 2-fluororibose
  modified_base 12: mod_base = OTHER; note = sugar modification: 2-fluororibose; note = thymine; note = backbone modification: 5'-phosphorothioate
  modified_base 13: mod_base = OTHER; note = sugar modification: 2-fluororibose; note = thymine; note = backbone modification: 5'-phosphorothioate
  modified_base 14: mod_base = OTHER; mod_base = m5c; note = sugar modification: 2-fluororibose; note = backbone modification: 5'-phosphorothioate
  modified_base 15: mod_base = OTHER; note = sugar modification: 2-fluororibose; note = backbone modification: 5'-phosphorothioate
  modified_base 16: mod_base = OTHER; note = thymine; note = sugar modification: 2-fluororibose; note = backbone modification: 5'-phosphorothioate
  modified_base 17: mod_base = m5c; mod_base = OTHER; note = sugar modification: 2'-O-methoxyethylribose; note = backbone modification: 5'-phosphorothioate
  modified_base 18: mod_base = OTHER; mod_base = m5c; note = sugar modification: lna
tgttcttgtacttcatcc

SEQ ID NO: 1315 - RNA, 18 nt, synthetic construct
  source 1..18: mol_type = other RNA; note = Antisense oligonucleotide
  modified_base 1: mod_base = OTHER; note = thymine; note = backbone modification: 5'-phosphorothioate; note = sugar modification: lna
  modified_base 2: mod_base = OTHER; note = backbone modification: 5'-phosphorothioate; note = sugar modification: lna
  modified_base 3: mod_base = OTHER; note = backbone modification: 5'-phosphorothioate; note = sugar modification: 2-fluororibose; note = thymine
  modified_base 4: mod_base = OTHER; note = backbone modification: 5'-phosphorothioate; note = sugar modification: 2-fluororibose; note = thymine
  modified_base 5: mod_base = m5c; mod_base = OTHER; note = sugar modification: 2-fluororibose; note = backbone modification: 5'-phosphorothioate
  modified_base 6: mod_base = OTHER; note = sugar modification: 2-fluororibose; note = thymine; note = backbone modification: 5'-phosphorothioate
  modified_base 7: mod_base = OTHER; note = thymine; note = backbone modification: 5'-phosphorothioate; note = sugar modification: 2-fluororibose
  modified_base 8: mod_base = OTHER; note = backbone modification: 5'-phosphorothioate; note = sugar modification: 2-fluororibose
  modified_base 9: mod_base = OTHER; note = thymine; note = sugar modification: 2'-O-methoxyethylribose; note = backbone modification: 5'-phosphorothioate
  modified_base 10: mod_base = OTHER; note = sugar modification: 2'-O-methoxyethylribose; note = backbone modification: 5'-phosphorothioate
  modified_base 11: mod_base = OTHER; mod_base = m5c; note = sugar modification: 2-fluororibose; note = backbone modification: 5'-phosphorothioate
  modified_base 12: mod_base = OTHER; note = backbone modification: 5'-phosphorothioate; note = sugar modification: 2-fluororibose; note = thymine
  modified_base 13: mod_base = OTHER; note = sugar modification: 2-fluororibose; note = backbone modification: 5'-phosphorothioate; note = thymine
  modified_base 14: mod_base = m5c; mod_base = OTHER; note = backbone modification: 5'-phosphorothioate; note = sugar modification: 2-fluororibose
  modified_base 15: mod_base = OTHER; note = backbone modification: 5'-phosphorothioate; note = sugar modification: 2-fluororibose
  modified_base 16: mod_base = OTHER; note = sugar modification: 2-fluororibose; note = backbone modification: 5'-phosphorothioate; note = thymine
  modified_base 17: mod_base = m5c; mod_base = OTHER; note = sugar modification: lna; note = backbone modification: 5'-phosphorothioate
  modified_base 18: mod_base = m5c; mod_base = OTHER; note = sugar modification: lna
tgttcttgtacttcatcc

SEQ ID NO: 1316 - RNA, 18 nt, synthetic construct
  source 1..18: mol_type = other RNA; note = Antisense oligonucleotide
  modified_base 1: mod_base = OTHER; note = sugar modification: lna; note = thymine; note = backbone modification: 5'-phosphorothioate
  modified_base 2: mod_base = OTHER; note = sugar modification: lna; note = backbone modification: 5'-phosphorothioate
  modified_base 3: mod_base = OTHER; note = thymine; note = sugar modification: 2'-O-methoxyethylribose; note = backbone modification: 5'-phosphorothioate
  modified_base 4: mod_base = OTHER; note = sugar modification: 2-fluororibose; note = thymine; note = backbone modification: 5'-phosphorothioate
  modified_base 5: mod_base = m5c; mod_base = OTHER; note = sugar modification: 2-fluororibose; note = backbone modification: 5'-phosphorothioate
  modified_base 6: mod_base = OTHER; note = backbone modification: 5'-phosphorothioate; note = thymine; note = sugar modification: 2-fluororibose
  modified_base 7: mod_base = OTHER; note = thymine; note = backbone modification: 5'-phosphorothioate; note = sugar modification: 2-fluororibose
  modified_base 8: mod_base = OTHER; note = backbone modification: 5'-phosphorothioate; note = sugar modification: 2'-O-methoxyethylribose
  modified_base 9: mod_base = OTHER; note = thymine; note = sugar modification: 2'-O-methoxyethylribose; note = backbone modification: 5'-phosphorothioate
  modified_base 10: mod_base = OTHER; note = backbone modification: 5'-phosphorothioate; note = sugar modification: 2'-O-methoxyethylribose
  modified_base 11: mod_base = m5c; mod_base = OTHER; note = sugar modification: 2'-O-methoxyethylribose; note = backbone modification: 5'-phosphorothioate
  modified_base 12: mod_base = OTHER; note = thymine; note = backbone modification: 5'-phosphorothioate; note = sugar modification: 2-fluororibose
  modified_base 13: mod_base = OTHER; note = backbone modification: 5'-phosphorothioate; note = thymine; note = sugar modification: 2-fluororibose
  modified_base 14: mod_base = OTHER; mod_base = m5c; note = sugar modification: 2-fluororibose; note = backbone modification: 5'-phosphorothioate
  modified_base 15: mod_base = OTHER; note = sugar modification: 2-fluororibose; note = backbone modification: 5'-phosphorothioate
  modified_base 16: mod_base = OTHER; note = sugar modification: 2'-O-methoxyethylribose; note = backbone modification: 5'-phosphorothioate; note = thymine
  modified_base 17: mod_base = m5c; mod_base = OTHER; note = sugar modification: lna; note = backbone modification: 5'-phosphorothioate
  modified_base 18: mod_base = OTHER; mod_base = m5c; note = sugar modification: lna
tgttcttgtacttcatcc

SEQ ID NO: 1317 - RNA, 18 nt, synthetic construct
  source 1..18: mol_type = other RNA; note = Antisense oligonucleotide
  modified_base 1: mod_base = OTHER; note = thymine; note = backbone modification: 5'-phosphorothioate; note = sugar modification: lna
  modified_base 2: mod_base = OTHER; note = backbone modification: 5'-phosphorothioate; note = sugar modification: 2'-O-methoxyethylribose
  modified_base 3: mod_base = OTHER; note = thymine; note = backbone modification: 5'-phosphorothioate; note = sugar modification: 2'-O-methoxyethylribose
  modified_base 4: mod_base = OTHER; note = sugar modification: 2-fluororibose; note = backbone modification: 5'-phosphorothioate; note = thymine
  modified_base 5: mod_base = OTHER; mod_base = m5c; note = sugar modification: 2-fluororibose; note = backbone modification: 5'-phosphorothioate
  modified_base 6: mod_base = OTHER; note = backbone modification: 5'-phosphorothioate; note = thymine; note = sugar modification: 2-fluororibose
  modified_base 7: mod_base = OTHER; note = sugar modification: 2-fluororibose; note = backbone modification: 5'-phosphorothioate; note = thymine
  modified_base 8: mod_base = OTHER; note = sugar modification: 2-fluororibose; note = backbone modification: 5'-phosphorothioate
  modified_base 9: mod_base = OTHER; note = backbone modification: 5'-phosphorothioate; note = thymine; note = sugar modification: 2'-O-methoxyethylribose
  modified_base 10: mod_base = OTHER; note = backbone modification: 5'-phosphorothioate; note = sugar modification: 2-fluororibose
  modified_base 11: mod_base = m5c; mod_base = OTHER; note = backbone modification: 5'-phosphorothioate; note = sugar modification: 2'-O-methoxyethylribose
  modified_base 12: mod_base = OTHER; note = backbone modification: 5'-phosphorothioate; note = sugar modification: 2-fluororibose; note = thymine
  modified_base 13: mod_base = OTHER; note = backbone modification: 5'-phosphorothioate; note = sugar modification: 2-fluororibose; note = thymine
  modified_base 14: mod_base = OTHER; mod_base = m5c; note = sugar modification: 2-fluororibose; note = backbone modification: 5'-phosphorothioate
  modified_base 15: mod_base = OTHER; note = backbone modification: 5'-phosphorothioate; note = sugar modification: 2-fluororibose
  modified_base 16: mod_base = OTHER; note = thymine; note = backbone modification: 5'-phosphorothioate; note = sugar modification: 2'-O-methoxyethylribose
  modified_base 17: mod_base = m5c; mod_base = OTHER; note = backbone modification: 5'-phosphorothioate; note = sugar modification: 2'-O-methoxyethylribose
  modified_base 18: mod_base = m5c; mod_base = OTHER; note = sugar modification: lna
tgttcttgtacttcatcc

SEQ ID NO: 1318 - RNA, 18 nt, synthetic construct
  source 1..18: mol_type = other RNA; note = Antisense oligonucleotide
  modified_base 1: mod_base = OTHER; note = sugar modification: lna; note = thymine; note = backbone modification: 5'-phosphorothioate
  modified_base 2: mod_base = OTHER; note = backbone modification: 5'-phosphorothioate; note = sugar modification: 2'-O-methoxyethylribose
  modified_base 3: mod_base = OTHER; note = backbone modification: 5'-phosphorothioate; note = thymine; note = sugar modification: 2'-O-methoxyethylribose
  modified_base 4: mod_base = OTHER; note = thymine; note = backbone modification: 5'-phosphorothioate; note = sugar modification: 2-fluororibose
  modified_base 5: mod_base = m5c; mod_base = OTHER; note = sugar modification: 2-fluororibose; note = backbone modification: 5'-phosphorothioate
  modified_base 6: mod_base = OTHER; note = backbone modification: 5'-phosphorothioate; note = sugar modification: 2-fluororibose; note = thymine
  modified_base 7: mod_base = OTHER; note = thymine; note = backbone modification: 5'-phosphorothioate; note = sugar modification: 2-fluororibose
  modified_base 8: mod_base = OTHER; note = sugar modification: 2'-O-methoxyethylribose; note = backbone modification: 5'-phosphorothioate
  modified_base 9: mod_base = OTHER; note = sugar modification: 2-fluororibose; note = thymine; note = backbone modification: 5'-phosphorothioate
  modified_base 10: mod_base = OTHER; note = sugar modification: 2'-O-methoxyethylribose; note = backbone modification: 5'-phosphorothioate
  modified_base 11: mod_base = m5c; mod_base = OTHER; note = sugar modification: 2-fluororibose; note = backbone modification: 5'-phosphorothioate
  modified_base 12: mod_base = OTHER; note = sugar modification: 2-fluororibose; note = backbone modification: 5'-phosphorothioate; note = thymine
  modified_base 13: mod_base = OTHER; note = sugar modification: 2-fluororibose; note = thymine; note = backbone modification: 5'-phosphorothioate
  modified_base 14: mod_base = m5c; mod_base = OTHER; note = sugar modification: 2-fluororibose; note = backbone modification: 5'-phosphorothioate
  modified_base 15: mod_base = OTHER; note = sugar modification: 2-fluororibose; note = backbone modification: 5'-phosphorothioate
  modified_base 16: mod_base = OTHER; note = thymine; note = backbone modification: 5'-phosphorothioate; note = sugar modification: 2'-O-methoxyethylribose
  modified_base 17: mod_base = OTHER; mod_base = m5c; note = backbone modification: 5'-phosphorothioate; note = sugar modification: 2'-O-methoxyethylribose
  modified_base 18: mod_base = m5c; mod_base = OTHER; note = sugar modification: lna
tgttcttgtacttcatcc

SEQ ID NO: 1319 - RNA, 18 nt, synthetic construct
  source 1..18: mol_type = other RNA; note = Antisense oligonucleotide
  modified_base 1: mod_base = OTHER; note = thymine; note = sugar modification: lna; note = backbone modification: 5'-phosphorothioate
  modified_base 2: mod_base = OTHER; note = backbone modification: 5'-phosphorothioate; note = sugar modification: 2'-O-methoxyethylribose
  modified_base 3: mod_base = OTHER; note = thymine; note = backbone modification: 5'-phosphorothioate; note = sugar modification: 2'-O-methoxyethylribose
  modified_base 4: mod_base = OTHER; note = backbone modification: 5'-phosphorothioate; note = sugar modification: 2-fluororibose; note = thymine
  modified_base 5: mod_base = OTHER; mod_base = m5c; note = backbone modification: 5'-phosphorothioate; note = sugar modification: 2-fluororibose
  modified_base 6: mod_base = OTHER; note = sugar modification: 2-fluororibose; note = backbone modification: 5'-phosphorothioate; note = thymine
  modified_base 7: mod_base = OTHER; note = backbone modification: 5'-phosphorothioate; note = thymine; note = sugar modification: 2-fluororibose
  modified_base 8: mod_base = OTHER; note = backbone modification: 5'-phosphorothioate; note = sugar modification: 2-fluororibose
  modified_base 9: mod_base = OTHER; note = thymine; note = backbone modification: 5'-phosphorothioate; note = sugar modification: 2'-O-methoxyethylribose
  modified_base 10: mod_base = OTHER; note = sugar modification: 2'-O-methoxyethylribose; note = backbone modification: 5'-phosphorothioate
  modified_base 11: mod_base = OTHER; mod_base = m5c; note = sugar modification: 2'-O-methoxyethylribose; note = backbone modification: 5'-phosphorothioate
  modified_base 12: mod_base = OTHER; note = backbone modification: 5'-phosphorothioate; note = sugar modification: 2'-O-methoxyethylribose; note = thymine
  modified_base 13: mod_base = OTHER; note = sugar modification: 2'-O-methoxyethylribose; note = thymine; note = backbone modification: 5'-phosphorothioate
  modified_base 14: mod_base = m5c; mod_base = OTHER; note = sugar modification: 2'-O-methoxyethylribose; note = backbone modification: 5'-phosphorothioate
  modified_base 15: mod_base = OTHER; note = backbone modification: 5'-phosphorothioate; note = sugar modification: 2'-O-methoxyethylribose
  modified_base 16: mod_base = OTHER; note = thymine; note = backbone modification: 5'-phosphorothioate; note = sugar modification: 2'-O-methoxyethylribose
  modified_base 17: mod_base = OTHER; mod_base = m5c; note = sugar modification: 2'-O-methoxyethylribose; note = backbone modification: 5'-phosphorothioate
  modified_base 18: mod_base = OTHER; mod_base = m5c; note = sugar modification: lna
tgttcttgtacttcatcc

SEQ ID NO: 1320 - RNA, 18 nt, synthetic construct
  source 1..18: mol_type = other RNA; note = Antisense oligonucleotide
  modified_base 1: mod_base = OTHER; note = thymine; note = sugar modification: lna; note = backbone modification: 5'-phosphorothioate
  modified_base 2: mod_base = OTHER; note = sugar modification: 2'-O-methoxyethylribose; note = backbone modification: 5'-phosphorothioate
  modified_base 3: mod_base = OTHER; note = thymine; note = sugar modification: 2'-O-methoxyethylribose; note = backbone modification: 5'-phosphorothioate
  modified_base 4: mod_base = OTHER; note = backbone modification: 5'-phosphorothioate; note = sugar modification: 2'-O-methoxyethylribose; note = thymine
  modified_base 5: mod_base = m5c; mod_base = OTHER; note = backbone modification: 5'-phosphorothioate; note = sugar modification: 2'-O-methoxyethylribose
  modified_base 6: mod_base = OTHER; note = backbone modification: 5'-phosphorothioate; note = thymine; note = sugar modification: 2-fluororibose
  modified_base 7: mod_base = OTHER; note = thymine; note = sugar modification: 2-fluororibose; note = backbone modification: 5'-phosphorothioate
  modified_base 8: mod_base = OTHER; note = sugar modification: 2-fluororibose; note = backbone modification: 5'-phosphorothioate
  modified_base 9: mod_base = OTHER; note = thymine; note = sugar modification: 2-fluororibose; note = backbone modification: 5'-phosphorothioate
  modified_base 10: mod_base = OTHER; note = sugar modification: 2-fluororibose; note = backbone modification: 5'-phosphorothioate
  modified_base 11: mod_base = m5c; mod_base = OTHER; note = backbone modification: 5'-phosphorothioate; note = sugar modification: 2'-O-methoxyethylribose
  modified_base 12: mod_base = OTHER; note = sugar modification: 2'-O-methoxyethylribose; note = thymine; note = backbone modification: 5'-phosphorothioate
  modified_base 13: mod_base = OTHER; note = backbone modification: 5'-phosphorothioate; note = sugar modification: 2'-O-methoxyethylribose; note = thymine
  modified_base 14: mod_base = OTHER; mod_base = m5c; note = backbone modification: 5'-phosphorothioate; note = sugar modification: 2'-O-methoxyethylribose
  modified_base 15: mod_base = OTHER; note = sugar modification: 2'-O-methoxyethylribose; note = backbone modification: 5'-phosphorothioate
  modified_base 16: mod_base = OTHER; note = thymine; note = backbone modification: 5'-phosphorothioate; note = sugar modification: 2'-O-methoxyethylribose
  modified_base 17: mod_base = OTHER; mod_base = m5c; note = sugar modification: 2'-O-methoxyethylribose; note = backbone modification: 5'-phosphorothioate
  modified_base 18: mod_base = m5c; mod_base = OTHER; note = sugar modification: lna
tgttcttgtacttcatcc

SEQ ID NO: 1321 - RNA, 18 nt, synthetic construct
  source 1..18: mol_type = other RNA; note = Antisense oligonucleotide
  modified_base 1: mod_base = OTHER; note = sugar modification: lna; note = backbone modification: 5'-phosphorothioate; note = thymine
  modified_base 2: mod_base = OTHER; note = backbone modification: 5'-phosphorothioate; note = sugar modification: 2'-O-methoxyethylribose
  modified_base 3: mod_base = OTHER; note = backbone modification: 5'-phosphorothioate; note = thymine; note = sugar modification: 2'-O-methoxyethylribose
  modified_base 4: mod_base = OTHER; note = sugar modification: 2'-O-methoxyethylribose; note = thymine; note = backbone modification: 5'-phosphorothioate
  modified_base 5: mod_base = m5c; mod_base = OTHER; note = backbone modification: 5'-phosphorothioate; note = sugar modification: 2'-O-methoxyethylribose
  modified_base 6: mod_base = OTHER; note = thymine; note = backbone modification: 5'-phosphorothioate; note = sugar modification: 2'-O-methoxyethylribose
  modified_base 7: mod_base = OTHER; note = thymine; note = sugar modification: 2-fluororibose; note = backbone modification: 5'-phosphorothioate
  modified_base 8: mod_base = OTHER; note = backbone modification: 5'-phosphorothioate; note = sugar modification: 2-fluororibose
  modified_base 9: mod_base = OTHER; note = thymine; note = backbone modification: 5'-phosphorothioate; note = sugar modification: 2-fluororibose
  modified_base 10: mod_base = OTHER; note = backbone modification: 5'-phosphorothioate; note = sugar modification: 2-fluororibose
  modified_base 11: mod_base = m5c; mod_base = OTHER; note = backbone modification: 5'-phosphorothioate; note = sugar modification: 2-fluororibose
  modified_base 12: mod_base = OTHER; note = backbone modification: 5'-phosphorothioate; note = thymine; note = sugar modification: 2'-O-methoxyethylribose
  modified_base 13: mod_base = OTHER; note = sugar modification: 2'-O-methoxyethylribose; note = backbone modification: 5'-phosphorothioate; note = thymine
  modified_base 14: mod_base = m5c; mod_base = OTHER; note = backbone modification: 5'-phosphorothioate; note = sugar modification: 2'-O-methoxyethylribose
  modified_base 15: mod_base = OTHER; note = backbone modification: 5'-phosphorothioate; note = sugar modification: 2'-O-methoxyethylribose
  modified_base 16: mod_base = OTHER; note = sugar modification: 2'-O-methoxyethylribose; note = backbone modification: 5'-phosphorothioate; note = thymine
  modified_base 17: mod_base = m5c; mod_base = OTHER; note = sugar modification: 2'-O-methoxyethylribose; note = backbone modification: 5'-phosphorothioate
  modified_base 18: mod_base = OTHER; mod_base = m5c; note = sugar modification: lna
tgttcttgtacttcatcc

SEQ ID NO: 1322 - RNA, 18 nt, synthetic construct
  source 1..18: mol_type = other RNA; note = Antisense oligonucleotide
  modified_base 1: mod_base = OTHER; note = backbone modification: 5'-phosphorothioate; note = thymine; note = sugar modification: lna
  modified_base 2: mod_base = OTHER; note = sugar modification: 2'-O-methoxyethylribose; note = backbone modification: 5'-phosphorothioate
  modified_base 3: mod_base = OTHER; note = thymine; note = sugar modification: 2'-O-methoxyethylribose; note = backbone modification: 5'-phosphorothioate
  modified_base 4: mod_base = OTHER; note = backbone modification: 5'-phosphorothioate; note = sugar modification: 2'-O-methoxyethylribose; note = thymine
  modified_base 5: mod_base = m5c; mod_base = OTHER; note = sugar modification: 2'-O-methoxyethylribose; note = backbone modification: 5'-phosphorothioate
  modified_base 6: mod_base = OTHER; note = thymine; note = backbone modification: 5'-phosphorothioate; note = sugar modification: 2'-O-methoxyethylribose
  modified_base 7: mod_base = OTHER; note = backbone modification: 5'-phosphorothioate; note = thymine; note = sugar modification: 2'-O-methoxyethylribose
  modified_base 8: mod_base = OTHER; note = sugar modification: 2'-O-methoxyethylribose; note = backbone modification: 5'-phosphorothioate
  modified_base 9: mod_base = OTHER; note = sugar modification: 2-fluororibose; note = thymine; note = backbone modification: 5'-phosphorothioate
  modified_base 10: mod_base = OTHER; note = backbone modification: 5'-phosphorothioate; note = sugar modification: 2-fluororibose
  modified_base 11: mod_base = OTHER; mod_base = m5c; note = backbone modification: 5'-phosphorothioate; note = sugar modification: 2-fluororibose
  modified_base 12: mod_base = OTHER; note = sugar modification: 2-fluororibose; note = thymine; note = backbone modification: 5'-phosphorothioate
  modified_base 13: mod_base = OTHER; note = sugar modification: 2-fluororibose; note = thymine; note = backbone modification: 5'-phosphorothioate
  modified_base 14: mod_base = m5c; mod_base = OTHER; note = sugar modification: 2'-O-methoxyethylribose; note = backbone modification: 5'-phosphorothioate
  modified_base 15: mod_base = OTHER; note = sugar modification: 2'-O-methoxyethylribose; note = backbone modification: 5'-phosphorothioate
  modified_base 16: mod_base = OTHER; note = thymine; note = backbone modification: 5'-phosphorothioate; note = sugar modification: 2'-O-methoxyethylribose
  modified_base 17: mod_base = OTHER; mod_base = m5c; note = backbone modification: 5'-phosphorothioate; note = sugar modification: 2'-O-methoxyethylribose
  modified_base 18: mod_base = OTHER; mod_base = m5c; note = sugar modification: lna
tgttcttgtacttcatcc

SEQ ID NO: 1323 - RNA, 18 nt, synthetic construct
  source 1..18: mol_type = other RNA; note = Antisense oligonucleotide
  modified_base 1: mod_base = OTHER; note = backbone modification: 5'-phosphorothioate; note = sugar modification: lna; note = thymine
  modified_base 2: mod_base = OTHER; note = backbone modification: 5'-phosphorothioate; note = sugar modification: 2'-O-methoxyethylribose
  modified_base 3: mod_base = OTHER; note = sugar modification: 2'-O-methoxyethylribose; note = backbone modification: 5'-phosphorothioate; note = thymine
  modified_base 4: mod_base = OTHER; note = backbone modification: 5'-phosphorothioate; note = thymine; note = sugar modification: 2'-O-methoxyethylribose
  modified_base 5: mod_base = OTHER; mod_base = m5c; note = backbone modification: 5'-phosphorothioate; note = sugar modification: 2'-O-methoxyethylribose
  modified_base 6: mod_base = OTHER; note = backbone modification: 5'-phosphorothioate; note = thymine; note = sugar modification: 2'-O-methoxyethylribose
  modified_base 7: mod_base = OTHER; note = sugar modification: 2'-O-methoxyethylribose; note = thymine; note = backbone modification: 5'-phosphorothioate
  modified_base 8: mod_base = OTHER; note = backbone modification: 5'-phosphorothioate; note = sugar modification: 2'-O-methoxyethylribose
  modified_base 9: mod_base = OTHER; note = sugar modification: 2'-O-methoxyethylribose; note = thymine; note = backbone modification: 5'-phosphorothioate
  modified_base 10: mod_base = OTHER; note = sugar modification: 2'-O-methoxyethylribose; note = backbone modification: 5'-phosphorothioate
  modified_base 11: mod_base = OTHER; mod_base = m5c; note = sugar modification: 2-fluororibose; note = backbone modification: 5'-phosphorothioate
  modified_base 12: mod_base = OTHER; note = sugar modification: 2-fluororibose; note = backbone modification: 5'-phosphorothioate; note = thymine
  modified_base 13: mod_base = OTHER; note = thymine; note = sugar modification: 2-fluororibose; note = backbone modification: 5'-phosphorothioate
  modified_base 14: mod_base = m5c; mod_base = OTHER; note = sugar modification: 2-fluororibose; note = backbone modification: 5'-phosphorothioate
  modified_base 15: mod_base = OTHER; note = backbone modification: 5'-phosphorothioate; note = sugar modification: 2-fluororibose
  modified_base 16: mod_base = OTHER; note = backbone modification: 5'-phosphorothioate; note = sugar modification: 2'-O-methoxyethylribose; note = thymine
  modified_base 17: mod_base = OTHER; mod_base = m5c; note = backbone modification: 5'-phosphorothioate; note = sugar modification: 2'-O-methoxyethylribose
  modified_base 18: mod_base = OTHER; mod_base = m5c; note = sugar modification: lna
tgttcttgtacttcatcc

SEQ ID NO: 1324 - RNA, 18 nt, synthetic construct
  source 1..18: mol_type = other RNA; note = Antisense oligonucleotide
  modified_base 1: mod_base = OTHER; note = thymine; note = backbone modification: 5'-phosphorothioate; note = sugar modification: lna
  modified_base 2: mod_base = OTHER; note = sugar modification: 2'-O-methoxyethylribose; note = backbone modification: 5'-phosphorothioate
  modified_base 3: mod_base = OTHER; note = thymine; note = backbone modification: 5'-phosphorothioate; note = sugar modification: 2'-O-methoxyethylribose
  modified_base 4: mod_base = OTHER; note = sugar modification: 2-fluororibose; note = backbone modification: 5'-phosphorothioate; note = thymine
  modified_base 5: mod_base = m5c; mod_base = OTHER; note = backbone modification: 5'-phosphorothioate; note = sugar modification: 2-fluororibose
  modified_base 6: mod_base = OTHER; note = backbone modification: 5'-phosphorothioate; note = thymine; note = sugar modification: 2-fluororibose
  modified_base 7: mod_base = OTHER; note = thymine; note = sugar modification: 2-fluororibose; note = backbone modification: 5'-phosphorothioate
  modified_base 8: mod_base = OTHER; note = backbone modification: 5'-phosphorothioate; note = sugar modification: 2-fluororibose
  modified_base 9: mod_base = OTHER; note = thymine; note = sugar modification: 2-fluororibose; note = backbone modification: 5'-phosphorothioate
  modified_base 10: mod_base = OTHER; note = backbone modification: 5'-phosphorothioate; note = sugar modification: 2'-O-methoxyethylribose
  modified_base 11: mod_base = m5c; mod_base = OTHER; note = sugar modification: 2'-O-methoxyethylribose; note = backbone modification: 5'-phosphorothioate
  modified_base 12: mod_base = OTHER; note = thymine; note = sugar modification: 2'-O-methoxyethylribose; note = backbone modification: 5'-phosphorothioate
  modified_base 13: mod_base = OTHER; note = backbone modification: 5'-phosphorothioate; note = thymine; note = sugar modification: 2'-O-methoxyethylribose
  modified_base 14: mod_base = OTHER; mod_base = m5c; note = backbone modification: 5'-phosphorothioate; note = sugar modification: 2'-O-methoxyethylribose
  modified_base 15: mod_base = OTHER; note = backbone modification: 5'-phosphorothioate; note = sugar modification: 2'-O-methoxyethylribose
  modified_base 16: mod_base = OTHER; note = thymine; note = backbone modification: 5'-phosphorothioate; note = sugar modification: 2'-O-methoxyethylribose
  modified_base 17: mod_base = OTHER; mod_base = m5c; note = sugar modification: 2'-O-methoxyethylribose; note = backbone modification: 5'-phosphorothioate
  modified_base 18: mod_base = m5c; mod_base = OTHER; note = sugar modification: lna
tgttcttgtacttcatcc

SEQ ID NO: 1325 - RNA, 18 nt, synthetic construct
  source 1..18: mol_type = other RNA; note = Antisense oligonucleotide
  modified_base 1: mod_base = OTHER; note = backbone modification: 5'-phosphorothioate; note = thymine; note = sugar modification: lna
  modified_base 2: mod_base = OTHER; note = sugar modification: 2'-O-methoxyethylribose; note = backbone modification: 5'-phosphorothioate
  modified_base 3: mod_base = OTHER; note = sugar modification: 2'-O-methoxyethylribose; note = thymine; note = backbone modification: 5'-phosphorothioate
  modified_base 4: mod_base = OTHER; note = sugar modification: 2'-O-methoxyethylribose; note = thymine; note = backbone modification: 5'-phosphorothioate
  modified_base 5: mod_base = m5c; mod_base = OTHER; note = sugar modification: 2-fluororibose; note = backbone modification: 5'-phosphorothioate
  modified_base 6: mod_base = OTHER; note = backbone modification: 5'-phosphorothioate; note = thymine; note = sugar modification: 2-fluororibose
  modified_base 7: mod_base = OTHER; note = sugar modification: 2-fluororibose; note = thymine; note = backbone modification: 5'-phosphorothioate
  modified_base 8: mod_base = OTHER; note = backbone modification: 5'-phosphorothioate; note = sugar modification: 2-fluororibose
  modified_base 9: mod_base = OTHER; note = backbone modification: 5'-phosphorothioate; note = sugar modification: 2-fluororibose; note = thymine
  modified_base 10: mod_base = OTHER; note = backbone modification: 5'-phosphorothioate; note = sugar modification: 2-fluororibose
  modified_base 11: mod_base = m5c; mod_base = OTHER; note = sugar modification: 2'-O-methoxyethylribose; note = backbone modification: 5'-phosphorothioate
  modified_base 12: mod_base = OTHER; note = sugar modification: 2'-O-methoxyethylribose; note = thymine; note = backbone modification: 5'-phosphorothioate
  modified_base 13: mod_base = OTHER; note = sugar modification: 2'-O-methoxyethylribose; note = backbone modification: 5'-phosphorothioate; note = thymine
  modified_base 14: mod_base = OTHER; mod_base = m5c; note = sugar modification: 2'-O-methoxyethylribose; note = backbone modification: 5'-phosphorothioate
  modified_base 15: mod_base = OTHER; note = backbone modification: 5'-phosphorothioate; note = sugar modification: 2'-O-methoxyethylribose
  modified_base 16: mod_base = OTHER; note = backbone modification: 5'-phosphorothioate; note = thymine; note = sugar modification: 2'-O-methoxyethylribose
  modified_base 17: mod_base = OTHER; mod_base = m5c; note = sugar modification: 2'-O-methoxyethylribose; note = backbone modification: 5'-phosphorothioate
  modified_base 18: mod_base = m5c; mod_base = OTHER; note = sugar modification: lna
tgttcttgtacttcatcc

SEQ ID NO: 1326 - RNA, 18 nt, synthetic construct
  source 1..18: mol_type = other RNA; note = Antisense oligonucleotide
  modified_base 1: mod_base = OTHER; note = backbone modification: 5'-phosphorothioate; note = thymine; note = sugar modification: lna
  modified_base 2: mod_base = OTHER; note = sugar modification: 2'-O-methoxyethylribose; note = backbone modification: 5'-phosphorothioate
  modified_base 3: mod_base = OTHER; note = backbone modification: 5'-phosphorothioate; note = thymine; note = sugar modification: 2'-O-methoxyethylribose
  modified_base 4: mod_base = OTHER; note = backbone modification: 5'-phosphorothioate; note = sugar modification: 2'-O-methoxyethylribose; note = thymine
  modified_base 5: mod_base = m5c; mod_base = OTHER; note = sugar modification: 2'-O-methoxyethylribose; note = backbone modification: 5'-phosphorothioate
  modified_base 6: mod_base = OTHER; note = sugar modification: 2-fluororibose; note = backbone modification: 5'-phosphorothioate; note = thymine
  modified_base 7: mod_base = OTHER; note = sugar modification: 2-fluororibose; note = thymine; note = backbone modification: 5'-phosphorothioate
  modified_base 8: mod_base = OTHER; note = sugar modification: 2-fluororibose; note = backbone modification: 5'-phosphorothioate
  modified_base 9: mod_base = OTHER; note = sugar modification: 2-fluororibose; note = backbone modification: 5'-phosphorothioate; note = thymine
  modified_base 10: mod_base = OTHER; note = sugar modification: 2-fluororibose; note = backbone modification: 5'-phosphorothioate
  modified_base 11: mod_base = OTHER; mod_base = m5c; note = backbone modification: 5'-phosphorothioate; note = sugar modification: 2-fluororibose
  modified_base 12: mod_base = OTHER; note = thymine; note = sugar modification: 2'-O-methoxyethylribose; note = backbone modification: 5'-phosphorothioate
  modified_base 13: mod_base = OTHER; note = sugar modification: 2'-O-methoxyethylribose; note = thymine; note = backbone modification: 5'-phosphorothioate
  modified_base 14: mod_base = OTHER; mod_base = m5c; note = backbone modification: 5'-phosphorothioate; note = sugar modification: 2'-O-methoxyethylribose
  modified_base 15: mod_base = OTHER; note = sugar modification: 2'-O-methoxyethylribose; note = backbone modification: 5'-phosphorothioate
  modified_base 16: mod_base = OTHER; note = backbone modification: 5'-phosphorothioate; note = sugar modification: 2'-O-methoxyethylribose; note = thymine
  modified_base 17: mod_base = OTHER; mod_base = m5c; note = backbone modification: 5'-phosphorothioate; note = sugar modification: 2'-O-methoxyethylribose
  modified_base 18: mod_base = OTHER; mod_base = m5c; note = sugar modification: lna
tgttcttgtacttcatcc

SEQ ID NO: 1327 - RNA, 18 nt, synthetic construct
  source 1..18: mol_type = other RNA; note = Antisense oligonucleotide
  modified_base 1: mod_base = OTHER; note = sugar modification: lna; note = backbone modification: 5'-phosphorothioate; note = thymine
  modified_base 2: mod_base = OTHER; note = backbone modification: 5'-phosphorothioate; note = sugar modification: 2'-O-methoxyethylribose
  modified_base 3: mod_base = OTHER; note = thymine; note = sugar modification: 2'-O-methoxyethylribose; note = backbone modification: 5'-phosphorothioate
  modified_base 4: mod_base = OTHER; note = backbone modification: 5'-phosphorothioate; note = thymine; note = sugar modification: 2'-O-methoxyethylribose
  modified_base 5: mod_base = OTHER; mod_base = m5c; note = backbone modification: 5'-phosphorothioate; note = sugar modification: 2'-O-methoxyethylribose
  modified_base 6: mod_base = OTHER; note = sugar modification: 2'-O-methoxyethylribose; note = thymine; note = backbone modification: 5'-phosphorothioate
  modified_base 7: mod_base = OTHER; note = sugar modification: 2-fluororibose; note = thymine; note = backbone modification: 5'-phosphorothioate
  modified_base 8: mod_base = OTHER; note = sugar modification: 2-fluororibose; note = backbone modification: 5'-phosphorothioate
  modified_base 9: mod_base = OTHER; note = thymine; note = backbone modification: 5'-phosphorothioate; note = sugar modification: 2-fluororibose
  modified_base 10: mod_base = OTHER; note = backbone modification: 5'-phosphorothioate; note = sugar modification: 2-fluororibose
  modified_base 11: mod_base = OTHER; mod_base = m5c; note = backbone modification: 5'-phosphorothioate; note = sugar modification: 2-fluororibose
  modified_base 12: mod_base = OTHER; note = thymine; note = backbone modification: 5'-phosphorothioate; note = sugar modification: 2-fluororibose
  modified_base 13: mod_base = OTHER; note = sugar modification: 2'-O-methoxyethylribose; note = backbone modification: 5'-phosphorothioate; note = thymine
  modified_base 14: mod_base = OTHER; mod_base = m5c; note = sugar modification: 2'-O-methoxyethylribose; note = backbone modification: 5'-phosphorothioate
  modified_base 15: mod_base = OTHER; note = backbone modification: 5'-phosphorothioate; note = sugar modification: 2'-O-methoxyethylribose
  modified_base 16: mod_base = OTHER; note = thymine; note = sugar modification: 2'-O-methoxyethylribose; note = backbone modification: 5'-phosphorothioate
  modified_base 17: mod_base = m5c; mod_base = OTHER; note = backbone modification: 5'-phosphorothioate; note = sugar modification: 2'-O-methoxyethylribose
  modified_base 18: mod_base = OTHER; mod_base = m5c; note = sugar modification: lna
tgttcttgtacttcatcc

SEQ ID NO: 1328 - RNA, 18 nt, synthetic construct
  source 1..18: mol_type = other RNA; note = Antisense oligonucleotide
  modified_base 1: mod_base = OTHER; note = backbone modification: 5'-phosphorothioate; note = sugar modification: lna; note = thymine
  modified_base 2: mod_base = OTHER; note = backbone modification: 5'-phosphorothioate; note = sugar modification: 2'-O-methoxyethylribose
  modified_base 3: mod_base = OTHER; note = backbone modification: 5'-phosphorothioate; note = sugar modification: 2'-O-methoxyethylribose; note = thymine
  modified_base 4: mod_base = OTHER; note = sugar modification: 2'-O-methoxyethylribose; note = backbone modification: 5'-phosphorothioate; note = thymine
  modified_base 5: mod_base = OTHER; mod_base = m5c; note = sugar modification: 2'-O-methoxyethylribose; note = backbone modification: 5'-phosphorothioate
  modified_base 6: mod_base = OTHER; note = thymine; note = sugar modification: 2'-O-methoxyethylribose; note = backbone modification: 5'-phosphorothioate
  modified_base 7: mod_base = OTHER; note = thymine; note = backbone modification: 5'-phosphorothioate; note = sugar modification: 2'-O-methoxyethylribose
  modified_base 8: mod_base = OTHER; note = sugar modification: 2-fluororibose; note = backbone modification: 5'-phosphorothioate
  modified_base 9: mod_base = OTHER; note = sugar modification: 2-fluororibose; note = thymine; note = backbone modification: 5'-phosphorothioate
  modified_base 10: mod_base = OTHER; note = backbone modification: 5'-phosphorothioate; note = sugar modification: 2-fluororibose
  modified_base 11: mod_base = OTHER; mod_base = m5c; note = backbone modification: 5'-phosphorothioate; note = sugar modification: 2-fluororibose
  modified_base 12: mod_base = OTHER; note = sugar modification: 2-fluororibose; note = thymine; note = backbone modification: 5'-phosphorothioate
  modified_base 13: mod_base = OTHER; note = sugar modification: 2-fluororibose; note = backbone modification: 5'-phosphorothioate; note = thymine
  modified_base 14: mod_base = m5c; mod_base = OTHER; note = backbone modification: 5'-phosphorothioate; note = sugar modification: 2'-O-methoxyethylribose
  modified_base 15: mod_base = OTHER; note = backbone modification: 5'-phosphorothioate; note = sugar modification: 2'-O-methoxyethylribose
  modified_base 16: mod_base = OTHER; note = backbone modification: 5'-phosphorothioate; note = sugar modification: 2'-O-methoxyethylribose; note = thymine
  modified_base 17: mod_base = OTHER; mod_base = m5c; note = backbone modification: 5'-phosphorothioate; note = sugar modification: 2'-O-methoxyethylribose
  modified_base 18: mod_base = OTHER; mod_base = m5c; note = sugar modification: lna
tgttcttgtacttcatcc

SEQ ID NO: 1329 - RNA, 18 nt, synthetic construct
  source 1..18: mol_type = other RNA; note = Antisense oligonucleotide
  modified_base 1: mod_base = OTHER; note = backbone modification: 5'-phosphorothioate; note = thymine; note = sugar modification: lna
  modified_base 2: mod_base = OTHER; note = sugar modification: 2'-O-methoxyethylribose; note = backbone modification: 5'-phosphorothioate
  modified_base 3: mod_base = OTHER; note = backbone modification: 5'-phosphorothioate; note = thymine; note = sugar modification: 2'-O-methoxyethylribose
  modified_base 4: mod_base = OTHER; note = sugar modification: 2'-O-methoxyethylribose; note = backbone modification: 5'-phosphorothioate; note = thymine
  modified_base 5: mod_base = m5c; mod_base = OTHER; note = sugar modification: 2'-O-methoxyethylribose; note = backbone modification: 5'-phosphorothioate
  modified_base 6: mod_base = OTHER; note = sugar modification: 2'-O-methoxyethylribose; note = backbone modification: 5'-phosphorothioate; note = thymine
  modified_base 7: mod_base = OTHER; note = backbone modification: 5'-phosphorothioate; note = sugar modification: 2'-O-methoxyethylribose; note = thymine
  modified_base 8: mod_base = OTHER; note = backbone modification: 5'-phosphorothioate; note = sugar modification: 2'-O-methoxyethylribose
  modified_base 9: mod_base = OTHER; note = sugar modification: 2-fluororibose; note = thymine; note = backbone modification: 5'-phosphorothioate
  modified_base 10: mod_base = OTHER; note = sugar modification: 2-fluororibose; note = backbone modification: 5'-phosphorothioate
  modified_base 11: mod_base = m5c; mod_base = OTHER; note = sugar modification: 2-fluororibose; note = backbone modification: 5'-phosphorothioate
  modified_base 12: mod_base = OTHER; note = backbone modification: 5'-phosphorothioate; note = sugar modification: 2-fluororibose; note = thymine
  modified_base 13: mod_base = OTHER; note = sugar modification: 2-fluororibose; note = thymine; note = backbone modification: 5'-phosphorothioate
  modified_base 14: mod_base = OTHER; mod_base = m5c; note = sugar modification: 2-fluororibose; note = backbone modification: 5'-phosphorothioate
  modified_base 15: mod_base = OTHER; note = sugar modification: 2'-O-methoxyethylribose; note = backbone modification: 5'-phosphorothioate
  modified_base 16: mod_base = OTHER; note = backbone modification: 5'-phosphorothioate; note = thymine; note = sugar modification: 2'-O-methoxyethylribose
  modified_base 17: mod_base = m5c; mod_base = OTHER; note = sugar modification: 2'-O-methoxyethylribose; note = backbone modification: 5'-phosphorothioate
  modified_base 18: mod_base = m5c; mod_base = OTHER; note = sugar modification: lna
tgttcttgtacttcatcc

SEQ ID NO: 1330 - RNA, 18 nt, synthetic construct
  source 1..18: mol_type = other RNA; note = Antisense oligonucleotide
  modified_base 1: mod_base = OTHER; note = backbone modification: 5'-phosphorothioate; note = sugar modification: lna; note = thymine
  modified_base 2: mod_base = OTHER; note = sugar modification: 2'-O-methoxyethylribose; note = backbone modification: 5'-phosphorothioate
  modified_base 3: mod_base = OTHER; note = sugar modification: 2'-O-methoxyethylribose; note = thymine; note = backbone modification: 5'-phosphorothioate
  modified_base 4: mod_base = OTHER; note = sugar modification: 2'-O-methoxyethylribose; note = thymine; note = backbone modification: 5'-phosphorothioate
  modified_base 5: mod_base = OTHER; mod_base = m5c; note = sugar modification: 2'-O-methoxyethylribose; note = backbone modification: 5'-phosphorothioate
  modified_base 6: mod_base = OTHER; note = backbone modification: 5'-phosphorothioate; note = sugar modification: 2'-O-methoxyethylribose; note = thymine
  modified_base 7: mod_base = OTHER; note = backbone modification: 5'-phosphorothioate; note = thymine; note = sugar modification: 2'-O-methoxyethylribose
  modified_base 8: mod_base = OTHER; note = sugar modification: 2'-O-methoxyethylribose; note = backbone modification: 5'-phosphorothioate
  modified_base 9: mod_base = OTHER; note = sugar modification: 2'-O-methoxyethylribose; note = backbone modification: 5'-phosphorothioate; note = thymine
  modified_base 10: mod_base = OTHER; note = backbone modification: 5'-phosphorothioate; note = sugar modification: 2-fluororibose
  modified_base 11: mod_base = OTHER; mod_base = m5c; note = sugar modification: 2-fluororibose; note = backbone modification: 5'-phosphorothioate
  modified_base 12: mod_base = OTHER; note = backbone modification: 5'-phosphorothioate; note = thymine; note = sugar modification: 2-fluororibose
  modified_base 13: mod_base = OTHER; note = backbone modification: 5'-phosphorothioate; note = thymine; note = sugar modification: 2-fluororibose
  modified_base 14: mod_base = OTHER; mod_base = m5c; note = backbone modification: 5'-phosphorothioate; note = sugar modification: 2-fluororibose
  modified_base 15: mod_base = OTHER; note = backbone modification: 5'-phosphorothioate; note = sugar modification: 2-fluororibose
  modified_base 16: mod_base = OTHER; note = backbone modification: 5'-phosphorothioate; note = thymine; note = sugar modification: 2'-O-methoxyethylribose
  modified_base 17: mod_base = OTHER; mod_base = m5c; note = sugar modification: 2'-O-methoxyethylribose; note = backbone modification: 5'-phosphorothioate
  modified_base 18: mod_base = OTHER; mod_base = m5c; note = sugar modification: lna
tgttcttgtacttcatcc

SEQ ID NO: 1331 - RNA, 18 nt, synthetic construct
  source 1..18: mol_type = other RNA; note = Antisense oligonucleotide
  modified_base 1: mod_base = OTHER; note = backbone modification: 5'-phosphorothioate; note = thymine; note = sugar modification: lna
  modified_base 2: mod_base = OTHER; note = sugar modification: 2'-O-methoxyethylribose; note = backbone modification: 5'-phosphorothioate
  modified_base 3: mod_base = OTHER; note = thymine; note = backbone modification: 5'-phosphorothioate; note = sugar modification: 2'-O-methoxyethylribose
  modified_base 4: mod_base = OTHER; note = sugar modification: 2-fluororibose; note = thymine; note = backbone modification: 5'-phosphorothioate
  modified_base 5: mod_base = OTHER; mod_base = m5c; note = sugar modification: 2-fluororibose; note = backbone modification: 5'-phosphorothioate
  modified_base 6: mod_base = OTHER; note = thymine; note = sugar modification: 2-fluororibose; note = backbone modification: 5'-phosphorothioate
  modified_base 7: mod_base = OTHER; note = sugar modification: 2-fluororibose; note = thymine; note = backbone modification: 5'-phosphorothioate
  modified_base 8: mod_base = OTHER; note = backbone modification: 5'-phosphorothioate; note = sugar modification: 2-fluororibose
  modified_base 9: mod_base = OTHER; note = thymine; note = backbone modification: 5'-phosphorothioate; note = sugar modification: 2-fluororibose
  modified_base 10: mod_base = OTHER; note = sugar modification: 2-fluororibose; note = backbone modification: 5'-phosphorothioate
  modified_base 11: mod_base = m5c; mod_base = OTHER; note = sugar modification: 2'-O-methoxyethylribose; note = backbone modification: 5'-phosphorothioate
  modified_base 12: mod_base = OTHER; note = sugar modification: 2'-O-methoxyethylribose; note = backbone modification: 5'-phosphorothioate; note = thymine
  modified_base 13: mod_base = OTHER; note = thymine; note = backbone modification: 5'-phosphorothioate; note = sugar modification: 2'-O-methoxyethylribose
  modified_base 14: mod_base = m5c; mod_base = OTHER; note = backbone modification: 5'-phosphorothioate; note = sugar modification: 2'-O-methoxyethylribose
  modified_base 15: mod_base = OTHER; note = sugar modification: 2'-O-methoxyethylribose; note = backbone modification: 5'-phosphorothioate
  modified_base 16: mod_base = OTHER; note = thymine; note = sugar modification: 2'-O-methoxyethylribose; note = backbone modification: 5'-phosphorothioate
  modified_base 17: mod_base = OTHER; mod_base = m5c; note = backbone modification: 5'-phosphorothioate; note = sugar modification: 2'-O-methoxyethylribose
  modified_base 18: mod_base = m5c; mod_base = OTHER; note = sugar modification: lna
tgttcttgtacttcatcc

SEQ ID NO: 1332 - RNA, 18 nt, synthetic construct
  source 1..18: mol_type = other RNA; note = Antisense oligonucleotide
  modified_base 1: mod_base = OTHER; note = thymine; note = backbone modification: 5'-phosphorothioate; note = sugar modification: lna
  modified_base 2: mod_base = OTHER; note = sugar modification: 2'-O-methoxyethylribose; note = backbone modification: 5'-phosphorothioate
  modified_base 3: mod_base = OTHER; note = backbone modification: 5'-phosphorothioate; note = sugar modification: 2'-O-methoxyethylribose; note = thymine
  modified_base 4: mod_base = OTHER; note = backbone modification: 5'-phosphorothioate; note = sugar modification: 2'-O-methoxyethylribose; note = thymine
  modified_base 5: mod_base = m5c; mod_base = OTHER; note = backbone modification: 5'-phosphorothioate; note = sugar modification: 2-fluororibose
  modified_base 6: mod_base = OTHER; note = thymine; note = sugar modification: 2-fluororibose; note = backbone modification: 5'-phosphorothioate
  modified_base 7: mod_base = OTHER; note = sugar modification: 2-fluororibose; note = backbone modification: 5'-phosphorothioate; note = thymine
  modified_base 8: mod_base = OTHER; note = backbone modification: 5'-phosphorothioate; note = sugar modification: 2-fluororibose
  modified_base 9: mod_base = OTHER; note = thymine; note = sugar modification: 2-fluororibose; note = backbone modification: 5'-phosphorothioate
  modified_base 10: mod_base = OTHER; note = sugar modification: 2-fluororibose; note = backbone modification: 5'-phosphorothioate
  modified_base 11: mod_base = OTHER; mod_base = m5c; note = sugar modification: 2-fluororibose; note = backbone modification: 5'-phosphorothioate
  modified_base 12: mod_base = OTHER; note = backbone modification: 5'-phosphorothioate; note = sugar modification: 2'-O-methoxyethylribose; note = thymine
  modified_base 13: mod_base = OTHER; note = backbone modification: 5'-phosphorothioate; note = sugar modification: 2'-O-methoxyethylribose; note = thymine
  modified_base 14: mod_base = OTHER; mod_base = m5c; note = sugar modification: 2'-O-methoxyethylribose; note = backbone modification: 5'-phosphorothioate
  modified_base 15: mod_base = OTHER; note = backbone modification: 5'-phosphorothioate; note = sugar modification: 2'-O-methoxyethylribose
  modified_base 16: mod_base = OTHER; note = sugar modification: 2'-O-methoxyethylribose; note = backbone modification: 5'-phosphorothioate; note = thymine
  modified_base 17: mod_base = m5c; mod_base = OTHER; note = sugar modification: 2'-O-methoxyethylribose; note = backbone modification: 5'-phosphorothioate
  modified_base 18: mod_base = OTHER; mod_base = m5c; note = sugar modification: lna
tgttcttgtacttcatcc

SEQ ID NO: 1333 - RNA, 18 nt, synthetic construct
  source 1..18: mol_type = other RNA; note = Antisense oligonucleotide
  modified_base 1: mod_base = OTHER; note = sugar modification: lna; note = thymine; note = backbone modification: 5'-phosphorothioate
  modified_base 2: mod_base = OTHER; note = backbone modification: 5'-phosphorothioate; note = sugar modification: 2'-O-methoxyethylribose
  modified_base 3: mod_base = OTHER; note = thymine; note = sugar modification: 2'-O-methoxyethylribose; note = backbone modification: 5'-phosphorothioate
  modified_base 4: mod_base = OTHER; note = backbone modification: 5'-phosphorothioate; note = sugar modification: 2'-O-methoxyethylribose; note = thymine
  modified_base 5: mod_base = m5c; mod_base = OTHER; note = backbone modification: 5'-phosphorothioate; note = sugar modification: 2'-O-methoxyethylribose
  modified_base 6: mod_base = OTHER; note = sugar modification: 2-fluororibose; note = backbone modification: 5'-phosphorothioate; note = thymine
  modified_base 7: mod_base = OTHER; note = thymine; note = sugar modification: 2-fluororibose; note = backbone modification: 5'-phosphorothioate
  modified_base 8: mod_base = OTHER; note = backbone modification: 5'-phosphorothioate; note = sugar modification: 2-fluororibose
  modified_base 9: mod_base = OTHER; note = thymine; note = sugar modification: 2-fluororibose; note = backbone modification: 5'-phosphorothioate
  modified_base 10: mod_base = OTHER; note = sugar modification: 2-fluororibose; note = backbone modification: 5'-phosphorothioate
  modified_base 11: mod_base = OTHER; mod_base = m5c; note = backbone modification: 5'-phosphorothioate; note = sugar modification: 2-fluororibose
  modified_base 12: mod_base = OTHER; note = backbone modification: 5'-phosphorothioate; note = sugar modification: 2-fluororibose; note = thymine
  modified_base 13: mod_base = OTHER; note = sugar modification: 2'-O-methoxyethylribose; note = backbone modification: 5'-phosphorothioate; note = thymine
  modified_base 14: mod_base = m5c; mod_base = OTHER; note = backbone modification: 5'-phosphorothioate; note = sugar modification: 2'-O-methoxyethylribose
  modified_base 15: mod_base = OTHER; note = sugar modification: 2'-O-methoxyethylribose; note = backbone modification: 5'-phosphorothioate
  modified_base 16: mod_base = OTHER; note = sugar modification: 2'-O-methoxyethylribose; note = backbone modification: 5'-phosphorothioate; note = thymine
  modified_base 17: mod_base = m5c; mod_base = OTHER; note = backbone modification: 5'-phosphorothioate; note = sugar modification: 2'-O-methoxyethylribose
  modified_base 18: mod_base = m5c; mod_base = OTHER; note = sugar modification: lna
tgttcttgtacttcatcc

SEQ ID NO: 1334 - RNA, 18 nt, synthetic construct
  source 1..18: mol_type = other RNA; note = Antisense oligonucleotide
  modified_base 1: mod_base = OTHER; note = thymine; note = backbone modification: 5'-phosphorothioate; note = sugar modification: lna
  modified_base 2: mod_base = OTHER; note = sugar modification: 2'-O-methoxyethylribose; note = backbone modification: 5'-phosphorothioate
  modified_base 3: mod_base = OTHER; note = sugar modification: 2'-O-methoxyethylribose; note = backbone modification: 5'-phosphorothioate; note = thymine
  modified_base 4: mod_base = OTHER; note = sugar modification: 2'-O-methoxyethylribose; note = backbone modification: 5'-phosphorothioate; note = thymine
  modified_base 5: mod_base = m5c; mod_base = OTHER; note = backbone modification: 5'-phosphorothioate; note = sugar modification: 2'-O-methoxyethylribose
  modified_base 6: mod_base = OTHER; note = thymine; note = sugar modification: 2'-O-methoxyethylribose; note = backbone modification: 5'-phosphorothioate
  modified_base 7: mod_base = OTHER; note = sugar modification: 2-fluororibose; note = backbone modification: 5'-phosphorothioate; note = thymine
  modified_base 8: mod_base = OTHER; note = backbone modification: 5'-phosphorothioate; note = sugar modification: 2-fluororibose
  modified_base 9: mod_base = OTHER; note = sugar modification: 2-fluororibose; note = backbone modification: 5'-phosphorothioate; note = thymine
  modified_base 10: mod_base = OTHER; note = backbone modification: 5'-phosphorothioate; note = sugar modification: 2-fluororibose
  modified_base 11: mod_base = OTHER; mod_base = m5c; note = sugar modification: 2-fluororibose; note = backbone modification: 5'-phosphorothioate
  modified_base 12: mod_base = OTHER; note = sugar modification: 2-fluororibose; note = backbone modification: 5'-phosphorothioate; note = thymine
  modified_base 13: mod_base = OTHER; note = sugar modification: 2-fluororibose; note = thymine; note = backbone modification: 5'-phosphorothioate
  modified_base 14: mod_base = m5c; mod_base = OTHER; note = backbone modification: 5'-phosphorothioate; note = sugar modification: 2'-O-methoxyethylribose
  modified_base 15: mod_base = OTHER; note = backbone modification: 5'-phosphorothioate; note = sugar modification: 2'-O-methoxyethylribose
  modified_base 16: mod_base = OTHER; note = thymine; note = sugar modification: 2'-O-methoxyethylribose; note = backbone modification: 5'-phosphorothioate
  modified_base 17: mod_base = m5c; mod_base = OTHER; note = backbone modification: 5'-phosphorothioate; note = sugar modification: 2'-O-methoxyethylribose
  modified_base 18: mod_base = OTHER; mod_base = m5c; note = sugar modification: lna
tgttcttgtacttcatcc

SEQ ID NO: 1335 - RNA, 18 nt, synthetic construct
  source 1..18: mol_type = other RNA; note = Antisense oligonucleotide
  modified_base 1: mod_base = OTHER; note = sugar modification: lna; note = backbone modification: 5'-phosphorothioate; note = thymine
  modified_base 2: mod_base = OTHER; note = backbone modification: 5'-phosphorothioate; note = sugar modification: 2'-O-methoxyethylribose
  modified_base 3: mod_base = OTHER; note = sugar modification: 2'-O-methoxyethylribose; note = thymine; note = backbone modification: 5'-phosphorothioate
  modified_base 4: mod_base = OTHER; note = backbone modification: 5'-phosphorothioate; note = thymine; note = sugar modification: 2'-O-methoxyethylribose
  modified_base 5: mod_base = OTHER; mod_base = m5c; note = backbone modification: 5'-phosphorothioate; note = sugar modification: 2'-O-methoxyethylribose
  modified_base 6: mod_base = OTHER; note = sugar modification: 2'-O-methoxyethylribose; note = thymine; note = backbone modification: 5'-phosphorothioate
  modified_base 7: mod_base = OTHER; note = sugar modification: 2'-O-methoxyethylribose; note = thymine; note = backbone modification: 5'-phosphorothioate
  modified_base 8: mod_base = OTHER; note = sugar modification: 2-fluororibose; note = backbone modification: 5'-phosphorothioate
  modified_base 9: mod_base = OTHER; note = sugar modification: 2-fluororibose; note = backbone modification: 5'-phosphorothioate; note = thymine
  modified_base 10: mod_base = OTHER; note = sugar modification: 2-fluororibose; note = backbone modification: 5'-phosphorothioate
  modified_base 11: mod_base = OTHER; mod_base = m5c; note = backbone modification: 5'-phosphorothioate; note = sugar modification: 2-fluororibose
  modified_base 12: mod_base = OTHER; note = thymine; note = backbone modification: 5'-phosphorothioate; note = sugar modification: 2-fluororibose
  modified_base 13: mod_base = OTHER; note = thymine; note = sugar modification: 2-fluororibose; note = backbone modification: 5'-phosphorothioate
  modified_base 14: mod_base = m5c; mod_base = OTHER; note = backbone modification: 5'-phosphorothioate; note = sugar modification: 2-fluororibose
  modified_base 15: mod_base = OTHER; note = sugar modification: 2'-O-methoxyethylribose; note = backbone modification: 5'-phosphorothioate
  modified_base 16: mod_base = OTHER; note = backbone modification: 5'-phosphorothioate; note = thymine; note = sugar modification: 2'-O-methoxyethylribose
  modified_base 17: mod_base = m5c; mod_base = OTHER; note = backbone modification: 5'-phosphorothioate; note = sugar modification: 2'-O-methoxyethylribose
  modified_base 18: mod_base = OTHER; mod_base = m5c; note = sugar modification: lna
tgttcttgtacttcatcc

SEQ ID NO: 1336 - RNA, 18 nt, synthetic construct
  source 1..18: mol_type = other RNA; note = Antisense oligonucleotide
  modified_base 1: mod_base = OTHER; note = thymine; note = backbone modification: 5'-phosphorothioate; note = sugar modification: lna
  modified_base 2: mod_base = OTHER; note = sugar modification: 2'-O-methoxyethylribose; note = backbone modification: 5'-phosphorothioate
  modified_base 3: mod_base = OTHER; note = sugar modification: 2'-O-methoxyethylribose; note = backbone modification: 5'-phosphorothioate; note = thymine
  modified_base 4: mod_base = OTHER; note = thymine; note = backbone modification: 5'-phosphorothioate; note = sugar modification: 2'-O-methoxyethylribose
  modified_base 5: mod_base = m5c; mod_base = OTHER; note = backbone modification: 5'-phosphorothioate; note = sugar modification: 2'-O-methoxyethylribose
  modified_base 6: mod_base = OTHER; note = thymine; note = sugar modification: 2'-O-methoxyethylribose; note = backbone modification: 5'-phosphorothioate
  modified_base 7: mod_base = OTHER; note = sugar modification: 2'-O-methoxyethylribose; note = backbone modification: 5'-phosphorothioate; note = thymine
  modified_base 8: mod_base = OTHER; note = sugar modification: 2'-O-methoxyethylribose; note = backbone modification: 5'-phosphorothioate
  modified_base 9: mod_base = OTHER; note = backbone modification: 5'-phosphorothioate; note = thymine; note = sugar modification: 2-fluororibose
  modified_base 10: mod_base = OTHER; note = backbone modification: 5'-phosphorothioate; note = sugar modification: 2-fluororibose
  modified_base 11: mod_base = OTHER; mod_base = m5c; note = backbone modification: 5'-phosphorothioate; note = sugar modification: 2-fluororibose
  modified_base 12: mod_base = OTHER; note = sugar modification: 2-fluororibose; note = backbone modification: 5'-phosphorothioate; note = thymine
  modified_base 13: mod_base = OTHER; note = thymine; note = backbone modification: 5'-phosphorothioate; note = sugar modification: 2-fluororibose
  modified_base 14: mod_base = m5c; mod_base = OTHER; note = backbone modification: 5'-phosphorothioate; note = sugar modification: 2-fluororibose
  modified_base 15: mod_base = OTHER; note = sugar modification: 2-fluororibose; note = backbone modification: 5'-phosphorothioate
  modified_base 16: mod_base = OTHER; note = backbone modification: 5'-phosphorothioate; note = sugar modification: 2'-O-methoxyethylribose; note = thymine
  modified_base 17: mod_base = m5c; mod_base = OTHER; note = backbone modification: 5'-phosphorothioate; note = sugar modification: 2'-O-methoxyethylribose
  modified_base 18: mod_base = OTHER; mod_base = m5c; note = sugar modification: lna
tgttcttgtacttcatcc

SEQ ID NO: 1337 - RNA, 18 nt, synthetic construct
  source 1..18: mol_type = other RNA; note = Antisense oligonucleotide
  modified_base 1: mod_base = OTHER; note = sugar modification: lna; note = thymine; note = backbone modification: 5'-phosphorothioate
  modified_base 2: mod_base = OTHER; note = sugar modification: 2'-O-methoxyethylribose; note = backbone modification: 5'-phosphorothioate
  modified_base 3: mod_base = OTHER; note = backbone modification: 5'-phosphorothioate; note = thymine; note = sugar modification: 2'-O-methoxyethylribose
  modified_base 4: mod_base = OTHER; note = thymine; note = sugar modification: 2-fluororibose; note = backbone modification: 5'-phosphorothioate
  modified_base 5: mod_base = m5c; mod_base = OTHER; note = sugar modification: 2-fluororibose; note = backbone modification: 5'-phosphorothioate
  modified_base 6: mod_base = OTHER; note = thymine; note = backbone modification: 5'-phosphorothioate; note = sugar modification: 2-fluororibose
  modified_base 7: mod_base = OTHER; note = backbone modification: 5'-phosphorothioate; note = thymine; note = sugar modification: 2-fluororibose
  modified_base 8: mod_base = OTHER; note = backbone modification: 5'-phosphorothioate; note = sugar modification: 2-fluororibose
  modified_base 9: mod_base = OTHER; note = backbone modification: 5'-phosphorothioate; note = sugar modification: 2-fluororibose; note = thymine
  modified_base 10: mod_base = OTHER; note = backbone modification: 5'-phosphorothioate; note = sugar modification: 2-fluororibose
  modified_base 11: mod_base = OTHER; mod_base = m5c; note = sugar modification: 2-fluororibose; note = backbone modification: 5'-phosphorothioate
  modified_base 12: mod_base = OTHER; note = thymine; note = sugar modification: 2'-O-methoxyethylribose; note = backbone modification: 5'-phosphorothioate
  modified_base 13: mod_base = OTHER; note = thymine; note = backbone modification: 5'-phosphorothioate; note = sugar modification: 2'-O-methoxyethylribose
  modified_base 14: mod_base = m5c; mod_base = OTHER; note = backbone modification: 5'-phosphorothioate; note = sugar modification: 2'-O-methoxyethylribose
  modified_base 15: mod_base = OTHER; note = backbone modification: 5'-phosphorothioate; note = sugar modification: 2'-O-methoxyethylribose
  modified_base 16: mod_base = OTHER; note = sugar modification: 2'-O-methoxyethylribose; note = backbone modification: 5'-phosphorothioate; note = thymine
  modified_base 17: mod_base = m5c; mod_base = OTHER; note = sugar modification: 2'-O-methoxyethylribose; note = backbone modification: 5'-phosphorothioate
  modified_base 18: mod_base = OTHER; mod_base = m5c; note = sugar modification: lna
tgttcttgtacttcatcc

SEQ ID NO: 1338 - RNA, 18 nt, synthetic construct
  source 1..18: mol_type = other RNA; note = Antisense oligonucleotide
  modified_base 1: mod_base = OTHER; note = sugar modification: lna; note = backbone modification: 5'-phosphorothioate; note = thymine
  modified_base 2: mod_base = OTHER; note = sugar modification: 2'-O-methoxyethylribose; note = backbone modification: 5'-phosphorothioate
  modified_base 3: mod_base = OTHER; note = sugar modification: 2'-O-methoxyethylribose; note = thymine; note = backbone modification: 5'-phosphorothioate
  modified_base 4: mod_base = OTHER; note = sugar modification: 2'-O-methoxyethylribose; note = thymine; note = backbone modification: 5'-phosphorothioate
  modified_base 5: mod_base = OTHER; mod_base = m5c; note = sugar modification: 2-fluororibose; note = backbone modification: 5'-phosphorothioate
  modified_base 6: mod_base = OTHER; note = sugar modification: 2-fluororibose; note = backbone modification: 5'-phosphorothioate; note = thymine
  modified_base 7: mod_base = OTHER; note = sugar modification: 2-fluororibose; note = backbone modification: 5'-phosphorothioate; note = thymine
  modified_base 8: mod_base = OTHER; note = backbone modification: 5'-phosphorothioate; note = sugar modification: 2-fluororibose
  modified_base 9: mod_base = OTHER; note = backbone modification: 5'-phosphorothioate; note = thymine; note = sugar modification: 2-fluororibose
  modified_base 10: mod_base = OTHER; note = sugar modification: 2-fluororibose; note = backbone modification: 5'-phosphorothioate
  modified_base 11: mod_base = m5c; mod_base = OTHER; note = backbone modification: 5'-phosphorothioate; note = sugar modification: 2-fluororibose
  modified_base 12: mod_base = OTHER; note = backbone modification: 5'-phosphorothioate; note = sugar modification: 2-fluororibose; note = thymine
  modified_base 13: mod_base = OTHER; note = backbone modification: 5'-phosphorothioate; note = thymine; note = sugar modification: 2'-O-methoxyethylribose
  modified_base 14: mod_base = OTHER; mod_base = m5c; note = backbone modification: 5'-phosphorothioate; note = sugar modification: 2'-O-methoxyethylribose
  modified_base 15: mod_base = OTHER; note = sugar modification: 2'-O-methoxyethylribose; note = backbone modification: 5'-phosphorothioate
  modified_base 16: mod_base = OTHER; note = sugar modification: 2'-O-methoxyethylribose; note = thymine; note = backbone modification: 5'-phosphorothioate
  modified_base 17: mod_base = m5c; mod_base = OTHER; note = sugar modification: 2'-O-methoxyethylribose; note = backbone modification: 5'-phosphorothioate
  modified_base 18: mod_base = OTHER; mod_base = m5c; note = sugar modification: lna
tgttcttgtacttcatcc

SEQ ID NO: 1339 - RNA, 18 nt, synthetic construct
  source 1..18: mol_type = other RNA; note = Antisense oligonucleotide
  modified_base 1: mod_base = OTHER; note = backbone modification: 5'-phosphorothioate; note = thymine; note = sugar modification: lna
  modified_base 2: mod_base = OTHER; note = sugar modification: 2'-O-methoxyethylribose; note = backbone modification: 5'-phosphorothioate
  modified_base 3: mod_base = OTHER; note = sugar modification: 2'-O-methoxyethylribose; note = thymine; note = backbone modification: 5'-phosphorothioate
  modified_base 4: mod_base = OTHER; note = thymine; note = sugar modification: 2'-O-methoxyethylribose; note = backbone modification: 5'-phosphorothioate
  modified_base 5: mod_base = m5c; mod_base = OTHER; note = backbone modification: 5'-phosphorothioate; note = sugar modification: 2'-O-methoxyethylribose
  modified_base 6: mod_base = OTHER; note = backbone modification: 5'-phosphorothioate; note = thymine; note = sugar modification: 2-fluororibose
  modified_base 7: mod_base = OTHER; note = backbone modification: 5'-phosphorothioate; note = sugar modification: 2-fluororibose; note = thymine
  modified_base 8: mod_base = OTHER; note = sugar modification: 2-fluororibose; note = backbone modification: 5'-phosphorothioate
  modified_base 9: mod_base = OTHER; note = thymine; note = backbone modification: 5'-phosphorothioate; note = sugar modification: 2-fluororibose
  modified_base 10: mod_base = OTHER; note = backbone modification: 5'-phosphorothioate; note = sugar modification: 2-fluororibose
  modified_base 11: mod_base = m5c; mod_base = OTHER; note = sugar modification: 2-fluororibose; note = backbone modification: 5'-phosphorothioate
  modified_base 12: mod_base = OTHER; note = backbone modification: 5'-phosphorothioate; note = sugar modification: 2-fluororibose; note = thymine
  modified_base 13: mod_base = OTHER; note = sugar modification: 2-fluororibose; note = thymine; note = backbone modification: 5'-phosphorothioate
  modified_base 14: mod_base = OTHER; mod_base = m5c; note = backbone modification: 5'-phosphorothioate; note = sugar modification: 2'-O-methoxyethylribose
  modified_base 15: mod_base = OTHER; note = sugar modification: 2'-O-methoxyethylribose; note = backbone modification: 5'-phosphorothioate
  modified_base 16: mod_base = OTHER; note = thymine; note = sugar modification: 2'-O-methoxyethylribose; note = backbone modification: 5'-phosphorothioate
  modified_base 17: mod_base = OTHER; mod_base = m5c; note = sugar modification: 2'-O-methoxyethylribose; note = backbone modification: 5'-phosphorothioate
  modified_base 18: mod_base = m5c; mod_base = OTHER; note = sugar modification: lna
tgttcttgtacttcatcc

SEQ ID NO: 1340 - RNA, 18 nt, synthetic construct
  source 1..18: mol_type = other RNA; note = Antisense oligonucleotide
  modified_base 1: mod_base = OTHER; note = thymine; note = sugar modification: lna; note = backbone modification: 5'-phosphorothioate
  modified_base 2: mod_base = OTHER; note = sugar modification: 2'-O-methoxyethylribose; note = backbone modification: 5'-phosphorothioate
  modified_base 3: mod_base = OTHER; note = thymine; note = sugar modification: 2'-O-methoxyethylribose; note = backbone modification: 5'-phosphorothioate
  modified_base 4: mod_base = OTHER; note = thymine; note = sugar modification: 2'-O-methoxyethylribose; note = backbone modification: 5'-phosphorothioate
  modified_base 5: mod_base = OTHER; mod_base = m5c; note = backbone modification: 5'-phosphorothioate; note = sugar modification: 2'-O-methoxyethylribose
  modified_base 6: mod_base = OTHER; note = sugar modification: 2'-O-methoxyethylribose; note = thymine; note = backbone modification: 5'-phosphorothioate
  modified_base 7: mod_base = OTHER; note = sugar modification: 2-fluororibose; note = backbone modification: 5'-phosphorothioate; note = thymine
  modified_base 8: mod_base = OTHER; note = sugar modification: 2-fluororibose; note = backbone modification: 5'-phosphorothioate
  modified_base 9: mod_base = OTHER; note = thymine; note = backbone modification: 5'-phosphorothioate; note = sugar modification: 2-fluororibose
  modified_base 10: mod_base = OTHER; note = sugar modification: 2-fluororibose; note = backbone modification: 5'-phosphorothioate
  modified_base 11: mod_base = OTHER; mod_base = m5c; note = backbone modification: 5'-phosphorothioate; note = sugar modification: 2-fluororibose
  modified_base 12: mod_base = OTHER; note = sugar modification: 2-fluororibose; note = backbone modification: 5'-phosphorothioate; note = thymine
  modified_base 13: mod_base = OTHER; note = backbone modification: 5'-phosphorothioate; note = thymine; note = sugar modification: 2-fluororibose
  modified_base 14: mod_base = OTHER; mod_base = m5c; note = sugar modification: 2-fluororibose; note = backbone modification: 5'-phosphorothioate
  modified_base 15: mod_base = OTHER; note = backbone modification: 5'-phosphorothioate; note = sugar modification: 2'-O-methoxyethylribose
  modified_base 16: mod_base = OTHER; note = sugar modification: 2'-O-methoxyethylribose; note = backbone modification: 5'-phosphorothioate; note = thymine
  modified_base 17: mod_base = OTHER; mod_base = m5c; note = backbone modification: 5'-phosphorothioate; note = sugar modification: 2'-O-methoxyethylribose
  modified_base 18: mod_base = OTHER; mod_base = m5c; note = sugar modification: lna
tgttcttgtacttcatcc

SEQ ID NO: 1341 - RNA, 18 nt, synthetic construct
  source 1..18: mol_type = other RNA; note = Antisense oligonucleotide
  modified_base 1: mod_base = OTHER; note = thymine; note = sugar modification: lna; note = backbone modification: 5'-phosphorothioate
  modified_base 2: mod_base = OTHER; note = backbone modification: 5'-phosphorothioate; note = sugar modification: 2'-O-methoxyethylribose
  modified_base 3: mod_base = OTHER; note = thymine; note = sugar modification: 2'-O-methoxyethylribose; note = backbone modification: 5'-phosphorothioate
  modified_base 4: mod_base = OTHER; note = backbone modification: 5'-phosphorothioate; note = thymine; note = sugar modification: 2'-O-methoxyethylribose
  modified_base 5: mod_base = m5c; mod_base = OTHER; note = backbone modification: 5'-phosphorothioate; note = sugar modification: 2'-O-methoxyethylribose
  modified_base 6: mod_base = OTHER; note = backbone modification: 5'-phosphorothioate; note = thymine; note = sugar modification: 2'-O-methoxyethylribose
  modified_base 7: mod_base = OTHER; note = backbone modification: 5'-phosphorothioate; note = thymine; note = sugar modification: 2'-O-methoxyethylribose
  modified_base 8: mod_base = OTHER; note = sugar modification: 2-fluororibose; note = backbone modification: 5'-phosphorothioate
  modified_base 9: mod_base = OTHER; note = sugar modification: 2-fluororibose; note = backbone modification: 5'-phosphorothioate; note = thymine
  modified_base 10: mod_base = OTHER; note = backbone modification: 5'-phosphorothioate; note = sugar modification: 2-fluororibose
  modified_base 11: mod_base = OTHER; mod_base = m5c; note = backbone modification: 5'-phosphorothioate; note = sugar modification: 2-fluororibose
  modified_base 12: mod_base = OTHER; note = thymine; note = backbone modification: 5'-phosphorothioate; note = sugar modification: 2-fluororibose
  modified_base 13: mod_base = OTHER; note = backbone modification: 5'-phosphorothioate; note = thymine; note = sugar modification: 2-fluororibose
  modified_base 14: mod_base = OTHER; mod_base = m5c; note = backbone modification: 5'-phosphorothioate; note = sugar modification: 2-fluororibose
  modified_base 15: mod_base = OTHER; note = backbone modification: 5'-phosphorothioate; note = sugar modification: 2-fluororibose
  modified_base 16: mod_base = OTHER; note = sugar modification: 2'-O-methoxyethylribose; note = thymine; note = backbone modification: 5'-phosphorothioate
  modified_base 17: mod_base = m5c; mod_base = OTHER; note = backbone modification: 5'-phosphorothioate; note = sugar modification: 2'-O-methoxyethylribose
  modified_base 18: mod_base = m5c; mod_base = OTHER; note = sugar modification: lna
tgttcttgtacttcatcc

SEQ ID NO: 1342 - RNA, 18 nt, synthetic construct
  source 1..18: mol_type = other RNA; note = Antisense oligonucleotide
  modified_base 1: mod_base = OTHER; note = backbone modification: 5'-phosphorothioate; note = thymine; note = sugar modification: lna
  modified_base 2: mod_base = OTHER; note = backbone modification: 5'-phosphorothioate; note = sugar modification: 2'-O-methoxyethylribose
  modified_base 3: mod_base = OTHER; note = sugar modification: 2'-O-methoxyethylribose; note = backbone modification: 5'-phosphorothioate; note = thymine
  modified_base 4: mod_base = OTHER; note = thymine; note = sugar modification: 2-fluororibose; note = backbone modification: 5'-phosphorothioate
  modified_base 5: mod_base = m5c; mod_base = OTHER; note = sugar modification: 2-fluororibose; note = backbone modification: 5'-phosphorothioate
  modified_base 6: mod_base = OTHER; note = thymine; note = backbone modification: 5'-phosphorothioate; note = sugar modification: 2-fluororibose
  modified_base 7: mod_base = OTHER; note = thymine; note = backbone modification: 5'-phosphorothioate; note = sugar modification: 2-fluororibose
  modified_base 8: mod_base = OTHER; note = backbone modification: 5'-phosphorothioate; note = sugar modification: 2-fluororibose
  modified_base 9: mod_base = OTHER; note = backbone modification: 5'-phosphorothioate; note = sugar modification: 2-fluororibose; note = thymine
  modified_base 10: mod_base = OTHER; note = backbone modification: 5'-phosphorothioate; note = sugar modification: 2-fluororibose
  modified_base 11: mod_base = m5c; mod_base = OTHER; note = backbone modification: 5'-phosphorothioate; note = sugar modification: 2-fluororibose
  modified_base 12: mod_base = OTHER; note = backbone modification: 5'-phosphorothioate; note = sugar modification: 2-fluororibose; note = thymine
  modified_base 13: mod_base = OTHER; note = sugar modification: 2'-O-methoxyethylribose; note = backbone modification: 5'-phosphorothioate; note = thymine
  modified_base 14: mod_base = m5c; mod_base = OTHER; note = backbone modification: 5'-phosphorothioate; note = sugar modification: 2'-O-methoxyethylribose
  modified_base 15: mod_base = OTHER; note = backbone modification: 5'-phosphorothioate; note = sugar modification: 2'-O-methoxyethylribose
  modified_base 16: mod_base = OTHER; note = backbone modification: 5'-phosphorothioate; note = thymine; note = sugar modification: 2'-O-methoxyethylribose
  modified_base 17: mod_base = OTHER; mod_base = m5c; note = sugar modification: 2'-O-methoxyethylribose; note = backbone modification: 5'-phosphorothioate
  modified_base 18: mod_base = m5c; mod_base = OTHER; note = sugar modification: lna
tgttcttgtacttcatcc

SEQ ID NO: 1343 - RNA, 18 nt, synthetic construct
  source 1..18: mol_type = other RNA; note = Antisense oligonucleotide
  modified_base 1: mod_base = OTHER; note = thymine; note = backbone modification: 5'-phosphorothioate; note = sugar modification: lna
  modified_base 2: mod_base = OTHER; note = sugar modification: 2'-O-methoxyethylribose; note = backbone modification: 5'-phosphorothioate
  modified_base 3: mod_base = OTHER; note = sugar modification: 2'-O-methoxyethylribose; note = thymine; note = backbone modification: 5'-phosphorothioate
  modified_base 4: mod_base = OTHER; note = backbone modification: 5'-phosphorothioate; note = thymine; note = sugar modification: 2'-O-methoxyethylribose
  modified_base 5: mod_base = OTHER; mod_base = m5c; note = sugar modification: 2-fluororibose; note = backbone modification: 5'-phosphorothioate
  modified_base 6: mod_base = OTHER; note = sugar modification: 2-fluororibose; note = thymine; note = backbone modification: 5'-phosphorothioate
  modified_base 7: mod_base = OTHER; note = sugar modification: 2-fluororibose; note = backbone modification: 5'-phosphorothioate; note = thymine
  modified_base 8: mod_base = OTHER; note = backbone modification: 5'-phosphorothioate; note = sugar modification: 2-fluororibose
  modified_base 9: mod_base = OTHER; note = thymine; note = backbone modification: 5'-phosphorothioate; note = sugar modification: 2-fluororibose
  modified_base 10: mod_base = OTHER; note = backbone modification: 5'-phosphorothioate; note = sugar modification: 2-fluororibose
  modified_base 11: mod_base = OTHER; mod_base = m5c; note = sugar modification: 2-fluororibose; note = backbone modification: 5'-phosphorothioate
  modified_base 12: mod_base = OTHER; note = backbone modification: 5'-phosphorothioate; note = thymine; note = sugar modification: 2-fluororibose
  modified_base 13: mod_base = OTHER; note = thymine; note = backbone modification: 5'-phosphorothioate; note = sugar modification: 2-fluororibose
  modified_base 14: mod_base = OTHER; mod_base = m5c; note = sugar modification: 2'-O-methoxyethylribose; note = backbone modification: 5'-phosphorothioate
  modified_base 15: mod_base = OTHER; note = sugar modification: 2'-O-methoxyethylribose; note = backbone modification: 5'-phosphorothioate
  modified_base 16: mod_base = OTHER; note = backbone modification: 5'-phosphorothioate; note = sugar modification: 2'-O-methoxyethylribose; note = thymine
  modified_base 17: mod_base = OTHER; mod_base = m5c; note = backbone modification: 5'-phosphorothioate; note = sugar modification: 2'-O-methoxyethylribose
  modified_base 18: mod_base = OTHER; mod_base = m5c; note = sugar modification: lna
tgttcttgtacttcatcc

SEQ ID NO: 1344 - RNA, 18 nt, synthetic construct
  source 1..18: mol_type = other RNA; note = Antisense oligonucleotide
  modified_base 1: mod_base = OTHER; note = backbone modification: 5'-phosphorothioate; note = sugar modification: lna; note = thymine
  modified_base 2: mod_base = OTHER; note = sugar modification: 2'-O-methoxyethylribose; note = backbone modification: 5'-phosphorothioate
  modified_base 3: mod_base = OTHER; note = backbone modification: 5'-phosphorothioate; note = thymine; note = sugar modification: 2'-O-methoxyethylribose
  modified_base 4: mod_base = OTHER; note = thymine; note = backbone modification: 5'-phosphorothioate; note = sugar modification: 2'-O-methoxyethylribose
  modified_base 5: mod_base = OTHER; mod_base = m5c; note = sugar modification: 2'-O-methoxyethylribose; note = backbone modification: 5'-phosphorothioate
  modified_base 6: mod_base = OTHER; note = sugar modification: 2-fluororibose; note = thymine; note = backbone modification: 5'-phosphorothioate
  modified_base 7: mod_base = OTHER; note = backbone modification: 5'-phosphorothioate; note = sugar modification: 2-fluororibose; note = thymine
  modified_base 8: mod_base = OTHER; note = backbone modification: 5'-phosphorothioate; note = sugar modification: 2-fluororibose
  modified_base 9: mod_base = OTHER; note = sugar modification: 2-fluororibose; note = thymine; note = backbone modification: 5'-phosphorothioate
  modified_base 10: mod_base = OTHER; note = sugar modification: 2-fluororibose; note = backbone modification: 5'-phosphorothioate
  modified_base 11: mod_base = OTHER; mod_base = m5c; note = sugar modification: 2-fluororibose; note = backbone modification: 5'-phosphorothioate
  modified_base 12: mod_base = OTHER; note = thymine; note = backbone modification: 5'-phosphorothioate; note = sugar modification: 2-fluororibose
  modified_base 13: mod_base = OTHER; note = sugar modification: 2-fluororibose; note = backbone modification: 5'-phosphorothioate; note = thymine
  modified_base 14: mod_base = m5c; mod_base = OTHER; note = sugar modification: 2-fluororibose; note = backbone modification: 5'-phosphorothioate
  modified_base 15: mod_base = OTHER; note = backbone modification: 5'-phosphorothioate; note = sugar modification: 2'-O-methoxyethylribose
  modified_base 16: mod_base = OTHER; note = thymine; note = sugar modification: 2'-O-methoxyethylribose; note = backbone modification: 5'-phosphorothioate
  modified_base 17: mod_base = OTHER; mod_base = m5c; note = sugar modification: 2'-O-methoxyethylribose; note = backbone modification: 5'-phosphorothioate
  modified_base 18: mod_base = OTHER; mod_base = m5c; note = sugar modification: lna
tgttcttgtacttcatcc

SEQ ID NO: 1345 - RNA, 18 nt, synthetic construct
  source 1..18: mol_type = other RNA; note = Antisense oligonucleotide
  modified_base 1: mod_base = OTHER; note = thymine; note = sugar modification: lna; note = backbone modification: 5'-phosphorothioate
  modified_base 2: mod_base = OTHER; note = sugar modification: 2'-O-methoxyethylribose; note = backbone modification: 5'-phosphorothioate
  modified_base 3: mod_base = OTHER; note = backbone modification: 5'-phosphorothioate; note = sugar modification: 2'-O-methoxyethylribose; note = thymine
  modified_base 4: mod_base = OTHER; note = thymine; note = sugar modification: 2'-O-methoxyethylribose; note = backbone modification: 5'-phosphorothioate
  modified_base 5: mod_base = OTHER; mod_base = m5c; note = sugar modification: 2'-O-methoxyethylribose; note = backbone modification: 5'-phosphorothioate
  modified_base 6: mod_base = OTHER; note = backbone modification: 5'-phosphorothioate; note = thymine; note = sugar modification: 2'-O-methoxyethylribose
  modified_base 7: mod_base = OTHER; note = backbone modification: 5'-phosphorothioate; note = thymine; note = sugar modification: 2-fluororibose
  modified_base 8: mod_base = OTHER; note = backbone modification: 5'-phosphorothioate; note = sugar modification: 2-fluororibose
  modified_base 9: mod_base = OTHER; note = sugar modification: 2-fluororibose; note = thymine; note = backbone modification: 5'-phosphorothioate
  modified_base 10: mod_base = OTHER; note = backbone modification: 5'-phosphorothioate; note = sugar modification: 2-fluororibose
  modified_base 11: mod_base = OTHER; mod_base = m5c; note = sugar modification: 2-fluororibose; note = backbone modification: 5'-phosphorothioate
  modified_base 12: mod_base = OTHER; note = thymine; note = backbone modification: 5'-phosphorothioate; note = sugar modification: 2-fluororibose
  modified_base 13: mod_base = OTHER; note = thymine; note = backbone modification: 5'-phosphorothioate; note = sugar modification: 2-fluororibose
  modified_base 14: mod_base = OTHER; mod_base = m5c; note = backbone modification: 5'-phosphorothioate; note = sugar modification: 2-fluororibose
  modified_base 15: mod_base = OTHER; note = backbone modification: 5'-phosphorothioate; note = sugar modification: 2-fluororibose
  modified_base 16: mod_base = OTHER; note = thymine; note = sugar modification: 2'-O-methoxyethylribose; note = backbone modification: 5'-phosphorothioate
  modified_base 17: mod_base = OTHER; mod_base = m5c; note = backbone modification: 5'-phosphorothioate; note = sugar modification: 2'-O-methoxyethylribose
  modified_base 18: mod_base = OTHER; mod_base = m5c; note = sugar modification: lna
tgttcttgtacttcatcc

SEQ ID NO: 1346 - RNA, 18 nt, synthetic construct
  source 1..18: mol_type = other RNA; note = Antisense oligonucleotide
  modified_base 1: mod_base = OTHER; note = sugar modification: 2'-O-methoxyethylribose; note = backbone modification: 5'-phosphorothioate; note = thymine
  modified_base 2: mod_base = OTHER; note = sugar modification: 2-fluororibose; note = backbone modification: 5'-phosphorothioate
  modified_base 3: mod_base = OTHER; note = sugar modification: 2-fluororibose; note = backbone modification: 5'-phosphorothioate; note = thymine
  modified_base 4: mod_base = OTHER; note = thymine; note = backbone modification: 5'-phosphorothioate; note = sugar modification: 2-fluororibose
  modified_base 5: mod_base = m5c; mod_base = OTHER; note = backbone modification: 5'-phosphorothioate; note = sugar modification: 2-fluororibose
  modified_base 6: mod_base = OTHER; note = sugar modification: 2-fluororibose; note = thymine; note = backbone modification: 5'-phosphorothioate
  modified_base 7: mod_base = OTHER; note = thymine; note = backbone modification: 5'-phosphorothioate; note = sugar modification: 2-fluororibose
  modified_base 8: mod_base = OTHER; note = sugar modification: 2-fluororibose; note = backbone modification: 5'-phosphorothioate
  modified_base 9: mod_base = OTHER; note = sugar modification: 2-fluororibose; note = thymine; note = backbone modification: 5'-phosphorothioate
  modified_base 10: mod_base = OTHER; note = sugar modification: 2-fluororibose; note = backbone modification: 5'-phosphorothioate
  modified_base 11: mod_base = m5c; mod_base = OTHER; note = sugar modification: 2-fluororibose; note = backbone modification: 5'-phosphorothioate
  modified_base 12: mod_base = OTHER; note = sugar modification: 2-fluororibose; note = thymine; note = backbone modification: 5'-phosphorothioate
  modified_base 13: mod_base = OTHER; note = backbone modification: 5'-phosphorothioate; note = sugar modification: 2-fluororibose; note = thymine
  modified_base 14: mod_base = m5c; mod_base = OTHER; note = backbone modification: 5'-phosphorothioate; note = sugar modification: 2-fluororibose
  modified_base 15: mod_base = OTHER; note = sugar modification: 2-fluororibose; note = backbone modification: 5'-phosphorothioate
  modified_base 16: mod_base = OTHER; note = sugar modification: 2-fluororibose; note = backbone modification: 5'-phosphorothioate; note = thymine
  modified_base 17: mod_base = m5c; mod_base = OTHER; note = sugar modification: 2-fluororibose; note = backbone modification: 5'-phosphorothioate
  modified_base 18: mod_base = OTHER; mod_base = m5c; note = sugar modification: 2'-O-methoxyethylribose
tgttcttgtacttcatcc

SEQ ID NO: 1347 - RNA, 18 nt, synthetic construct
  source 1..18: mol_type = other RNA; note = Antisense oligonucleotide
  modified_base 1: mod_base = OTHER; note = thymine; note = backbone modification: 5'-phosphorothioate; note = sugar modification: lna
  modified_base 2: mod_base = OTHER; note = sugar modification: 2-fluororibose; note = backbone modification: 5'-phosphorothioate
  modified_base 3: mod_base = OTHER; note = thymine; note = backbone modification: 5'-phosphorothioate; note = sugar modification: 2'-O-methoxyethylribose
  modified_base 4: mod_base = OTHER; note = thymine; note = backbone modification: 5'-phosphorothioate; note = sugar modification: 2-fluororibose
  modified_base 5: mod_base = m5c; mod_base = OTHER; note = backbone modification: 5'-phosphorothioate; note = sugar modification: 2-fluororibose
  modified_base 6: mod_base = OTHER; note = backbone modification: 5'-phosphorothioate; note = thymine; note = sugar modification: 2-fluororibose
  modified_base 7: mod_base = OTHER; note = thymine; note = sugar modification: 2-fluororibose; note = backbone modification: 5'-phosphorothioate
  modified_base 8: mod_base = OTHER; note = sugar modification: 2-fluororibose; note = backbone modification: 5'-phosphorothioate
  modified_base 9: mod_base = OTHER; note = sugar modification: 2-fluororibose; note = thymine; note = backbone modification: 5'-phosphorothioate
  modified_base 10: mod_base = OTHER; note = backbone modification: 5'-phosphorothioate; note = sugar modification: 2-fluororibose
  modified_base 11: mod_base = OTHER; mod_base = m5c; note = backbone modification: 5'-phosphorothioate; note = sugar modification: 2-fluororibose
  modified_base 12: mod_base = OTHER; note = backbone modification: 5'-phosphorothioate; note = sugar modification: 2-fluororibose; note = thymine
  modified_base 13: mod_base = OTHER; note = backbone modification: 5'-phosphorothioate; note = thymine; note = sugar modification: 2-fluororibose
  modified_base 14: mod_base = m5c; mod_base = OTHER; note = backbone modification: 5'-phosphorothioate; note = sugar modification: 2-fluororibose
  modified_base 15: mod_base = OTHER; note = sugar modification: 2-fluororibose; note = backbone modification: 5'-phosphorothioate
  modified_base 16: mod_base = OTHER; note = thymine; note = sugar modification: 2-fluororibose; note = backbone modification: 5'-phosphorothioate
  modified_base 17: mod_base = OTHER; mod_base = m5c; note = sugar modification: 2-fluororibose; note = backbone modification: 5'-phosphorothioate
  modified_base 18: mod_base = OTHER; mod_base = m5c; note = sugar modification: lna
tgttcttgtacttcatcc

SEQ ID NO: 1348 - RNA, 18 nt, synthetic construct
  source 1..18: mol_type = other RNA; note = Antisense oligonucleotide
  modified_base 1: mod_base = OTHER; note = thymine; note = sugar modification: lna; note = backbone modification: 5'-phosphorothioate
  modified_base 2: mod_base = OTHER; note = sugar modification: 2-fluororibose; note = backbone modification: 5'-phosphorothioate
  modified_base 3: mod_base = OTHER; note = thymine; note = backbone modification: 5'-phosphorothioate; note = sugar modification: 2-fluororibose
  modified_base 4: mod_base = OTHER; note = thymine; note = sugar modification: 2'-O-methoxyethylribose; note = backbone modification: 5'-phosphorothioate
  modified_base 5: mod_base = OTHER; mod_base = m5c; note = backbone modification: 5'-phosphorothioate; note = sugar modification: 2-fluororibose
  modified_base 6: mod_base = OTHER; note = backbone modification: 5'-phosphorothioate; note = thymine; note = sugar modification: 2-fluororibose
  modified_base 7: mod_base = OTHER; note = sugar modification: 2-fluororibose; note = backbone modification: 5'-phosphorothioate; note = thymine
  modified_base 8: mod_base = OTHER; note = sugar modification: 2-fluororibose; note = backbone modification: 5'-phosphorothioate
  modified_base 9: mod_base = OTHER; note = sugar modification: 2-fluororibose; note = backbone modification: 5'-phosphorothioate; note = thymine
  modified_base 10: mod_base = OTHER; note = backbone modification: 5'-phosphorothioate; note = sugar modification: 2-fluororibose
  modified_base 11: mod_base = OTHER; mod_base = m5c; note = sugar modification: 2-fluororibose; note = backbone modification: 5'-phosphorothioate
  modified_base 12: mod_base = OTHER; note = thymine; note = sugar modification: 2-fluororibose; note = backbone modification: 5'-phosphorothioate
  modified_base 13: mod_base = OTHER; note = backbone modification: 5'-phosphorothioate; note = thymine; note = sugar modification: 2-fluororibose
  modified_base 14: mod_base = m5c; mod_base = OTHER; note = sugar modification: 2-fluororibose; note = backbone modification: 5'-phosphorothioate
  modified_base 15: mod_base = OTHER; note = backbone modification: 5'-phosphorothioate; note = sugar modification: 2-fluororibose
  modified_base 16: mod_base = OTHER; note = backbone modification: 5'-phosphorothioate; note = sugar modification: 2-fluororibose; note = thymine
  modified_base 17: mod_base = m5c; mod_base = OTHER; note = sugar modification: 2-fluororibose; note = backbone modification: 5'-phosphorothioate
  modified_base 18: mod_base = m5c; mod_base = OTHER; note = sugar modification: lna
tgttcttgtacttcatcc

SEQ ID NO: 1349 - RNA, 18 nt, synthetic construct
  source 1..18: mol_type = other RNA; note = Antisense oligonucleotide
  modified_base 1: mod_base = OTHER; note = backbone modification: 5'-phosphorothioate; note = sugar modification: lna; note = thymine
  modified_base 2: mod_base = OTHER; note = backbone modification: 5'-phosphorothioate; note = sugar modification: 2-fluororibose
  modified_base 3: mod_base = OTHER; note = sugar modification: 2-fluororibose; note = thymine; note = backbone modification: 5'-phosphorothioate
  modified_base 4: mod_base = OTHER; note = backbone modification: 5'-phosphorothioate; note = sugar modification: 2-fluororibose; note = thymine
  modified_base 5: mod_base = OTHER; mod_base = m5c; note = sugar modification: 2'-O-methoxyethylribose; note = backbone modification: 5'-phosphorothioate
  modified_base 6: mod_base = OTHER; note = backbone modification: 5'-phosphorothioate; note = sugar modification: 2-fluororibose; note = thymine
  modified_base 7: mod_base = OTHER; note = sugar modification: 2-fluororibose; note = thymine; note = backbone modification: 5'-phosphorothioate
  modified_base 8: mod_base = OTHER; note = sugar modification: 2-fluororibose; note = backbone modification: 5'-phosphorothioate
  modified_base 9: mod_base = OTHER; note = backbone modification: 5'-phosphorothioate; note = sugar modification: 2-fluororibose; note = thymine
  modified_base 10: mod_base = OTHER; note = sugar modification: 2-fluororibose; note = backbone modification: 5'-phosphorothioate
  modified_base 11: mod_base = m5c; mod_base = OTHER; note = sugar modification: 2-fluororibose; note = backbone modification: 5'-phosphorothioate
  modified_base 12: mod_base = OTHER; note = sugar modification: 2-fluororibose; note = backbone modification: 5'-phosphorothioate; note = thymine
  modified_base 13: mod_base = OTHER; note = sugar modification: 2-fluororibose; note = backbone modification: 5'-phosphorothioate; note = thymine
  modified_base 14: mod_base = m5c; mod_base = OTHER; note = backbone modification: 5'-phosphorothioate; note = sugar modification: 2-fluororibose
  modified_base 15: mod_base = OTHER; note = sugar modification: 2-fluororibose; note = backbone modification: 5'-phosphorothioate
  modified_base 16: mod_base = OTHER; note = backbone modification: 5'-phosphorothioate; note = thymine; note = sugar modification: 2-fluororibose
  modified_base 17: mod_base = OTHER; mod_base = m5c; note = sugar modification: 2-fluororibose; note = backbone modification: 5'-phosphorothioate
  modified_base 18: mod_base = OTHER; mod_base = m5c; note = sugar modification: lna
tgttcttgtacttcatcc

SEQ ID NO: 1350 - RNA, 18 nt, synthetic construct
  source 1..18: mol_type = other RNA; note = Antisense oligonucleotide
  modified_base 1: mod_base = OTHER; note = backbone modification: 5'-phosphorothioate; note = thymine; note = sugar modification: lna
  modified_base 2: mod_base = OTHER; note = backbone modification: 5'-phosphorothioate; note = sugar modification: 2-fluororibose
  modified_base 3: mod_base = OTHER; note = thymine; note = backbone modification: 5'-phosphorothioate; note = sugar modification: 2-fluororibose
  modified_base 4: mod_base = OTHER; note = sugar modification: 2-fluororibose; note = thymine; note = backbone modification: 5'-phosphorothioate
  modified_base 5: mod_base = m5c; mod_base = OTHER; note = backbone modification: 5'-phosphorothioate; note = sugar modification: 2-fluororibose
  modified_base 6: mod_base = OTHER; note = backbone modification: 5'-phosphorothioate; note = sugar modification: 2'-O-methoxyethylribose; note = thymine
  modified_base 7: mod_base = OTHER; note = sugar modification: 2-fluororibose; note = backbone modification: 5'-phosphorothioate; note = thymine
  modified_base 8: mod_base = OTHER; note = sugar modification: 2-fluororibose; note = backbone modification: 5'-phosphorothioate
  modified_base 9: mod_base = OTHER; note = sugar modification: 2-fluororibose; note = backbone modification: 5'-phosphorothioate; note = thymine
  modified_base 10: mod_base = OTHER; note = sugar modification: 2-fluororibose; note = backbone modification: 5'-phosphorothioate
  modified_base 11: mod_base = m5c; mod_base = OTHER; note = sugar modification: 2-fluororibose; note = backbone modification: 5'-phosphorothioate
  modified_base 12: mod_base = OTHER; note = backbone modification: 5'-phosphorothioate; note = sugar modification: 2-fluororibose; note = thymine
  modified_base 13: mod_base = OTHER; note = backbone modification: 5'-phosphorothioate; note = sugar modification: 2-fluororibose; note = thymine
  modified_base 14: mod_base = OTHER; mod_base = m5c; note = backbone modification: 5'-phosphorothioate; note = sugar modification: 2-fluororibose
  modified_base 15: mod_base = OTHER; note = backbone modification: 5'-phosphorothioate; note = sugar modification: 2-fluororibose
  modified_base 16: mod_base = OTHER; note = backbone modification: 5'-phosphorothioate; note = thymine; note = sugar modification: 2-fluororibose
  modified_base 17: mod_base = OTHER; mod_base = m5c; note = backbone modification: 5'-phosphorothioate; note = sugar modification: 2-fluororibose
  modified_base 18: mod_base = OTHER; mod_base = m5c; note = sugar modification: lna
tgttcttgtacttcatcc

SEQ ID NO: 1351 - RNA, 18 nt, synthetic construct
  source 1..18: mol_type = other RNA; note = Antisense oligonucleotide
  modified_base 1: mod_base = OTHER; note = backbone modification: 5'-phosphorothioate; note = thymine; note = sugar modification: lna
  modified_base 2: mod_base = OTHER; note = sugar modification: 2-fluororibose; note = backbone modification: 5'-phosphorothioate
  modified_base 3: mod_base = OTHER; note = backbone modification: 5'-phosphorothioate; note = sugar modification: 2-fluororibose; note = thymine
  modified_base 4: mod_base = OTHER; note = backbone modification: 5'-phosphorothioate; note = thymine; note = sugar modification: 2-fluororibose
  modified_base 5: mod_base = m5c; mod_base = OTHER; note = sugar modification: 2-fluororibose; note = backbone modification: 5'-phosphorothioate
  modified_base 6: mod_base = OTHER; note = thymine; note = backbone modification: 5'-phosphorothioate; note = sugar modification: 2-fluororibose
  modified_base 7: mod_base = OTHER; note = thymine; note = backbone modification: 5'-phosphorothioate; note = sugar modification: 2'-O-methoxyethylribose
  modified_base 8: mod_base = OTHER; note = backbone modification: 5'-phosphorothioate; note = sugar modification: 2-fluororibose
  modified_base 9: mod_base = OTHER; note = backbone modification: 5'-phosphorothioate; note = sugar modification: 2-fluororibose; note = thymine
  modified_base 10: mod_base = OTHER; note = sugar modification: 2-fluororibose; note = backbone modification: 5'-phosphorothioate
  modified_base 11: mod_base = m5c; mod_base = OTHER; note = backbone modification: 5'-phosphorothioate; note = sugar modification: 2-fluororibose
  modified_base 12: mod_base = OTHER; note = thymine; note = backbone modification: 5'-phosphorothioate; note = sugar modification: 2-fluororibose
  modified_base 13: mod_base = OTHER; note = backbone modification: 5'-phosphorothioate; note = thymine; note = sugar modification: 2-fluororibose
  modified_base 14: mod_base = OTHER; mod_base = m5c; note = sugar modification: 2-fluororibose; note = backbone modification: 5'-phosphorothioate
  modified_base 15: mod_base = OTHER; note = sugar modification: 2-fluororibose; note = backbone modification: 5'-phosphorothioate
  modified_base 16: mod_base = OTHER; note = thymine; note = sugar modification: 2-fluororibose; note = backbone modification: 5'-phosphorothioate
  modified_base 17: mod_base = OTHER; mod_base = m5c; note = sugar modification: 2-fluororibose; note = backbone modification: 5'-phosphorothioate
  modified_base 18: mod_base = OTHER; mod_base = m5c; note = sugar modification: lna
tgttcttgtacttcatcc

SEQ ID NO: 1352 - RNA, 18 nt, synthetic construct
  source 1..18: mol_type = other RNA; note = Antisense oligonucleotide
  modified_base 1: mod_base = OTHER; note = thymine; note = sugar modification: lna; note = backbone modification: 5'-phosphorothioate
  modified_base 2: mod_base = OTHER; note = sugar modification: 2-fluororibose; note = backbone modification: 5'-phosphorothioate
  modified_base 3: mod_base = OTHER; note = backbone modification: 5'-phosphorothioate; note = thymine; note = sugar modification: 2-fluororibose
  modified_base 4: mod_base = OTHER; note = backbone modification: 5'-phosphorothioate; note = thymine; note = sugar modification: 2-fluororibose
  modified_base 5: mod_base = OTHER; mod_base = m5c; note = backbone modification: 5'-phosphorothioate; note = sugar modification: 2-fluororibose
  modified_base 6: mod_base = OTHER; note = thymine; note = backbone modification: 5'-phosphorothioate; note = sugar modification: 2-fluororibose
  modified_base 7: mod_base = OTHER; note = sugar modification: 2-fluororibose; note = backbone modification: 5'-phosphorothioate; note = thymine
  modified_base 8: mod_base = OTHER; note = sugar modification: 2'-O-methoxyethylribose; note = backbone modification: 5'-phosphorothioate
  modified_base 9: mod_base = OTHER; note = backbone modification: 5'-phosphorothioate; note = thymine; note = sugar modification: 2-fluororibose
  modified_base 10: mod_base = OTHER; note = backbone modification: 5'-phosphorothioate; note = sugar modification: 2-fluororibose
  modified_base 11: mod_base = m5c; mod_base = OTHER; note = backbone modification: 5'-phosphorothioate; note = sugar modification: 2-fluororibose
  modified_base 12: mod_base = OTHER; note = thymine; note = sugar modification: 2-fluororibose; note = backbone modification: 5'-phosphorothioate
  modified_base 13: mod_base = OTHER; note = thymine; note = sugar modification: 2-fluororibose; note = backbone modification: 5'-phosphorothioate
  modified_base 14: mod_base = OTHER; mod_base = m5c; note = sugar modification: 2-fluororibose; note = backbone modification: 5'-phosphorothioate
  modified_base 15: mod_base = OTHER; note = backbone modification: 5'-phosphorothioate; note = sugar modification: 2-fluororibose
  modified_base 16: mod_base = OTHER; note = thymine; note = backbone modification: 5'-phosphorothioate; note = sugar modification: 2-fluororibose
  modified_base 17: mod_base = m5c; mod_base = OTHER; note = backbone modification: 5'-phosphorothioate; note = sugar modification: 2-fluororibose
  modified_base 18: mod_base = OTHER; mod_base = m5c; note = sugar modification: lna
tgttcttgtacttcatcc

SEQ ID NO: 1353 - RNA, 18 nt, synthetic construct
  source 1..18: mol_type = other RNA; note = Antisense oligonucleotide
  modified_base 1: mod_base = OTHER; note = backbone modification: 5'-phosphorothioate; note = thymine; note = sugar modification: lna
  modified_base 2: mod_base = OTHER; note = backbone modification: 5'-phosphorothioate; note = sugar modification: 2-fluororibose
  modified_base 3: mod_base = OTHER; note = sugar modification: 2-fluororibose; note = thymine; note = backbone modification: 5'-phosphorothioate
  modified_base 4: mod_base = OTHER; note = backbone modification: 5'-phosphorothioate; note = sugar modification: 2-fluororibose; note = thymine
  modified_base 5: mod_base = OTHER; mod_base = m5c; note = sugar modification: 2-fluororibose; note = backbone modification: 5'-phosphorothioate
  modified_base 6: mod_base = OTHER; note = sugar modification: 2-fluororibose; note = thymine; note = backbone modification: 5'-phosphorothioate
  modified_base 7: mod_base = OTHER; note = thymine; note = backbone modification: 5'-phosphorothioate; note = sugar modification: 2-fluororibose
  modified_base 8: mod_base = OTHER; note = backbone modification: 5'-phosphorothioate; note = sugar modification: 2-fluororibose
  modified_base 9: mod_base = OTHER; note = backbone modification: 5'-phosphorothioate; note = thymine; note = sugar modification: 2'-O-methoxyethylribose
  modified_base 10: mod_base = OTHER; note = backbone modification: 5'-phosphorothioate; note = sugar modification: 2-fluororibose
  modified_base 11: mod_base = m5c; mod_base = OTHER; note = backbone modification: 5'-phosphorothioate; note = sugar modification: 2-fluororibose
  modified_base 12: mod_base = OTHER; note = thymine; note = backbone modification: 5'-phosphorothioate; note = sugar modification: 2-fluororibose
  modified_base 13: mod_base = OTHER; note = sugar modification: 2-fluororibose; note = thymine; note = backbone modification: 5'-phosphorothioate
  modified_base 14: mod_base = OTHER; mod_base = m5c; note = backbone modification: 5'-phosphorothioate; note = sugar modification: 2-fluororibose
  modified_base 15: mod_base = OTHER; note = sugar modification: 2-fluororibose; note = backbone modification: 5'-phosphorothioate
  modified_base 16: mod_base = OTHER; note = backbone modification: 5'-phosphorothioate; note = thymine; note = sugar modification: 2-fluororibose
  modified_base 17: mod_base = m5c; mod_base = OTHER; note = backbone modification: 5'-phosphorothioate; note = sugar modification: 2-fluororibose
  modified_base 18: mod_base = m5c; mod_base = OTHER; note = sugar modification: lna
tgttcttgtacttcatcc

SEQ ID NO: 1354 - RNA, 18 nt, synthetic construct
  source 1..18: mol_type = other RNA; note = Antisense oligonucleotide
  modified_base 1: mod_base = OTHER; note = backbone modification: 5'-phosphorothioate; note = thymine; note = sugar modification: lna
  modified_base 2: mod_base = OTHER; note = sugar modification: 2-fluororibose; note = backbone modification: 5'-phosphorothioate
  modified_base 3: mod_base = OTHER; note = sugar modification: 2-fluororibose; note = backbone modification: 5'-phosphorothioate; note = thymine
  modified_base 4: mod_base = OTHER; note = sugar modification: 2-fluororibose; note = backbone modification: 5'-phosphorothioate; note = thymine
  modified_base 5: mod_base = OTHER; mod_base = m5c; note = backbone modification: 5'-phosphorothioate; note = sugar modification: 2-fluororibose
  modified_base 6: mod_base = OTHER; note = sugar modification: 2-fluororibose; note = backbone modification: 5'-phosphorothioate; note = thymine
  modified_base 7: mod_base = OTHER; note = sugar modification: 2-fluororibose; note = backbone modification: 5'-phosphorothioate; note = thymine
  modified_base 8: mod_base = OTHER; note = backbone modification: 5'-phosphorothioate; note = sugar modification: 2-fluororibose
  modified_base 9: mod_base = OTHER; note = sugar modification: 2-fluororibose; note = backbone modification: 5'-phosphorothioate; note = thymine
  modified_base 10: mod_base = OTHER; note = backbone modification: 5'-phosphorothioate; note = sugar modification: 2'-O-methoxyethylribose
  modified_base 11: mod_base = OTHER; mod_base = m5c; note = backbone modification: 5'-phosphorothioate; note = sugar modification: 2-fluororibose
  modified_base 12: mod_base = OTHER; note = thymine; note = backbone modification: 5'-phosphorothioate; note = sugar modification: 2-fluororibose
  modified_base 13: mod_base = OTHER; note = sugar modification: 2-fluororibose; note = thymine; note = backbone modification: 5'-phosphorothioate
  modified_base 14: mod_base = m5c; mod_base = OTHER; note = sugar modification: 2-fluororibose; note = backbone modification: 5'-phosphorothioate
  modified_base 15: mod_base = OTHER; note = sugar modification: 2-fluororibose; note = backbone modification: 5'-phosphorothioate
  modified_base 16: mod_base = OTHER; note = thymine; note = sugar modification: 2-fluororibose; note = backbone modification: 5'-phosphorothioate
  modified_base 17: mod_base = m5c; mod_base = OTHER; note = sugar modification: 2-fluororibose; note = backbone modification: 5'-phosphorothioate
  modified_base 18: mod_base = m5c; mod_base = OTHER; note = sugar modification: lna
tgttcttgtacttcatcc

SEQ ID NO: 1355 - RNA, 18 nt, synthetic construct
  source 1..18: mol_type = other RNA; note = Antisense oligonucleotide
  modified_base 1: mod_base = OTHER; note = sugar modification: lna; note = thymine; note = backbone modification: 5'-phosphorothioate
  modified_base 2: mod_base = OTHER; note = sugar modification: 2-fluororibose; note = backbone modification: 5'-phosphorothioate
  modified_base 3: mod_base = OTHER; note = thymine; note = sugar modification: 2-fluororibose; note = backbone modification: 5'-phosphorothioate
  modified_base 4: mod_base = OTHER; note = backbone modification: 5'-phosphorothioate; note = thymine; note = sugar modification: 2-fluororibose
  modified_base 5: mod_base = OTHER; mod_base = m5c; note = backbone modification: 5'-phosphorothioate; note = sugar modification: 2-fluororibose
  modified_base 6: mod_base = OTHER; note = sugar modification: 2-fluororibose; note = backbone modification: 5'-phosphorothioate; note = thymine
  modified_base 7: mod_base = OTHER; note = backbone modification: 5'-phosphorothioate; note = thymine; note = sugar modification: 2-fluororibose
  modified_base 8: mod_base = OTHER; note = backbone modification: 5'-phosphorothioate; note = sugar modification: 2-fluororibose
  modified_base 9: mod_base = OTHER; note = backbone modification: 5'-phosphorothioate; note = sugar modification: 2-fluororibose; note = thymine
  modified_base 10: mod_base = OTHER; note = sugar modification: 2-fluororibose; note = backbone modification: 5'-phosphorothioate
  modified_base 11: mod_base = OTHER; mod_base = m5c; note = backbone modification: 5'-phosphorothioate; note = sugar modification: 2'-O-methoxyethylribose
  modified_base 12: mod_base = OTHER; note = backbone modification: 5'-phosphorothioate; note = thymine; note = sugar modification: 2-fluororibose
  modified_base 13: mod_base = OTHER; note = sugar modification: 2-fluororibose; note = thymine; note = backbone modification: 5'-phosphorothioate
  modified_base 14: mod_base = m5c; mod_base = OTHER; note = sugar modification: 2-fluororibose; note = backbone modification: 5'-phosphorothioate
  modified_base 15: mod_base = OTHER; note = backbone modification: 5'-phosphorothioate; note = sugar modification: 2-fluororibose
  modified_base 16: mod_base = OTHER; note = backbone modification: 5'-phosphorothioate; note = thymine; note = sugar modification: 2-fluororibose
  modified_base 17: mod_base = OTHER; mod_base = m5c; note = backbone modification: 5'-phosphorothioate; note = sugar modification: 2-fluororibose
  modified_base 18: mod_base = m5c; mod_base = OTHER; note = sugar modification: lna
tgttcttgtacttcatcc

SEQ ID NO: 1356 - RNA, 18 nt, synthetic construct
  source 1..18: mol_type = other RNA; note = Antisense oligonucleotide
  modified_base 1: mod_base = OTHER; note = backbone modification: 5'-phosphorothioate; note = sugar modification: lna; note = thymine
  modified_base 2: mod_base = OTHER; note = backbone modification: 5'-phosphorothioate; note = sugar modification: 2-fluororibose
  modified_base 3: mod_base = OTHER; note = sugar modification: 2-fluororibose; note = thymine; note = backbone modification: 5'-phosphorothioate
  modified_base 4: mod_base = OTHER; note = backbone modification: 5'-phosphorothioate; note = thymine; note = sugar modification: 2-fluororibose
  modified_base 5: mod_base = m5c; mod_base = OTHER; note = sugar modification: 2-fluororibose; note = backbone modification: 5'-phosphorothioate
  modified_base 6: mod_base = OTHER; note = thymine; note = backbone modification: 5'-phosphorothioate; note = sugar modification: 2-fluororibose
  modified_base 7: mod_base = OTHER; note = backbone modification: 5'-phosphorothioate; note = thymine; note = sugar modification: 2-fluororibose
  modified_base 8: mod_base = OTHER; note = backbone modification: 5'-phosphorothioate; note = sugar modification: 2-fluororibose
  modified_base 9: mod_base = OTHER; note = thymine; note = sugar modification: 2-fluororibose; note = backbone modification: 5'-phosphorothioate
  modified_base 10: mod_base = OTHER; note = sugar modification: 2-fluororibose; note = backbone modification: 5'-phosphorothioate
  modified_base 11: mod_base = OTHER; mod_base = m5c; note = sugar modification: 2-fluororibose; note = backbone modification: 5'-phosphorothioate
  modified_base 12: mod_base = OTHER; note = thymine; note = sugar modification: 2'-O-methoxyethylribose; note = backbone modification: 5'-phosphorothioate
  modified_base 13: mod_base = OTHER; note = backbone modification: 5'-phosphorothioate; note = thymine; note = sugar modification: 2-fluororibose
  modified_base 14: mod_base = m5c; mod_base = OTHER; note = sugar modification: 2-fluororibose; note = backbone modification: 5'-phosphorothioate
  modified_base 15: mod_base = OTHER; note = sugar modification: 2-fluororibose; note = backbone modification: 5'-phosphorothioate
  modified_base 16: mod_base = OTHER; note = thymine; note = backbone modification: 5'-phosphorothioate; note = sugar modification: 2-fluororibose
  modified_base 17: mod_base = OTHER; mod_base = m5c; note = sugar modification: 2-fluororibose; note = backbone modification: 5'-phosphorothioate
  modified_base 18: mod_base = m5c; mod_base = OTHER; note = sugar modification: lna
tgttcttgtacttcatcc

SEQ ID NO: 1357 - RNA, 18 nt, synthetic construct
  source 1..18: mol_type = other RNA; note = Antisense oligonucleotide
  modified_base 1: mod_base = OTHER; note = backbone modification: 5'-phosphorothioate; note = thymine; note = sugar modification: lna
  modified_base 2: mod_base = OTHER; note = sugar modification: 2-fluororibose; note = backbone modification: 5'-phosphorothioate
  modified_base 3: mod_base = OTHER; note = sugar modification: 2-fluororibose; note = thymine; note = backbone modification: 5'-phosphorothioate
  modified_base 4: mod_base = OTHER; note = sugar modification: 2-fluororibose; note = backbone modification: 5'-phosphorothioate; note = thymine
  modified_base 5: mod_base = m5c; mod_base = OTHER; note = sugar modification: 2-fluororibose; note = backbone modification: 5'-phosphorothioate
  modified_base 6: mod_base = OTHER; note = thymine; note = sugar modification: 2-fluororibose; note = backbone modification: 5'-phosphorothioate
  modified_base 7: mod_base = OTHER; note = sugar modification: 2-fluororibose; note = backbone modification: 5'-phosphorothioate; note = thymine
  modified_base 8: mod_base = OTHER; note = backbone modification: 5'-phosphorothioate; note = sugar modification: 2-fluororibose
  modified_base 9: mod_base = OTHER; note = backbone modification: 5'-phosphorothioate; note = thymine; note = sugar modification: 2-fluororibose
  modified_base 10: mod_base = OTHER; note = backbone modification: 5'-phosphorothioate; note = sugar modification: 2-fluororibose
  modified_base 11: mod_base = m5c; mod_base = OTHER; note = backbone modification: 5'-phosphorothioate; note = sugar modification: 2-fluororibose
  modified_base 12: mod_base = OTHER; note = sugar modification: 2-fluororibose; note = thymine; note = backbone modification: 5'-phosphorothioate
  modified_base 13: mod_base = OTHER; note = sugar modification: 2'-O-methoxyethylribose; note = backbone modification: 5'-phosphorothioate; note = thymine
  modified_base 14: mod_base = OTHER; mod_base = m5c; note = backbone modification: 5'-phosphorothioate; note = sugar modification: 2-fluororibose
  modified_base 15: mod_base = OTHER; note = sugar modification: 2-fluororibose; note = backbone modification: 5'-phosphorothioate
  modified_base 16: mod_base = OTHER; note = backbone modification: 5'-phosphorothioate; note = sugar modification: 2-fluororibose; note = thymine
  modified_base 17: mod_base = OTHER; mod_base = m5c; note = sugar modification: 2-fluororibose; note = backbone modification: 5'-phosphorothioate
  modified_base 18: mod_base = OTHER; mod_base = m5c; note = sugar modification: lna
tgttcttgtacttcatcc

SEQ ID NO: 1358 - RNA, 18 nt, synthetic construct
  source 1..18: mol_type = other RNA; note = Antisense oligonucleotide
  modified_base 1: mod_base = OTHER; note = backbone modification: 5'-phosphorothioate; note = sugar modification: lna; note = thymine
  modified_base 2: mod_base = OTHER; note = sugar modification: 2-fluororibose; note = backbone modification: 5'-phosphorothioate
  modified_base 3: mod_base = OTHER; note = thymine; note = sugar modification: 2-fluororibose; note = backbone modification: 5'-phosphorothioate
  modified_base 4: mod_base = OTHER; note = thymine; note = backbone modification: 5'-phosphorothioate; note = sugar modification: 2-fluororibose
  modified_base 5: mod_base = m5c; mod_base = OTHER; note = sugar modification: 2-fluororibose; note = backbone modification: 5'-phosphorothioate
  modified_base 6: mod_base = OTHER; note = backbone modification: 5'-phosphorothioate; note = thymine; note = sugar modification: 2-fluororibose
  modified_base 7: mod_base = OTHER; note = sugar modification: 2-fluororibose; note = backbone modification: 5'-phosphorothioate; note = thymine
  modified_base 8: mod_base = OTHER; note = sugar modification: 2-fluororibose; note = backbone modification: 5'-phosphorothioate
  modified_base 9: mod_base = OTHER; note = backbone modification: 5'-phosphorothioate; note = thymine; note = sugar modification: 2-fluororibose
  modified_base 10: mod_base = OTHER; note = sugar modification: 2-fluororibose; note = backbone modification: 5'-phosphorothioate
  modified_base 11: mod_base = OTHER; mod_base = m5c; note = sugar modification: 2-fluororibose; note = backbone modification: 5'-phosphorothioate
  modified_base 12: mod_base = OTHER; note = sugar modification: 2-fluororibose; note = backbone modification: 5'-phosphorothioate; note = thymine
  modified_base 13: mod_base = OTHER; note = backbone modification: 5'-phosphorothioate; note = sugar modification: 2-fluororibose; note = thymine
  modified_base 14: mod_base = m5c; mod_base = OTHER; note = backbone modification: 5'-phosphorothioate; note = sugar modification: 2'-O-methoxyethylribose
  modified_base 15: mod_base = OTHER; note = backbone modification: 5'-phosphorothioate; note = sugar modification: 2-fluororibose
  modified_base 16: mod_base = OTHER; note = backbone modification: 5'-phosphorothioate; note = thymine; note = sugar modification: 2-fluororibose
  modified_base 17: mod_base = OTHER; mod_base = m5c; note = sugar modification: 2-fluororibose; note = backbone modification: 5'-phosphorothioate
  modified_base 18: mod_base = OTHER; mod_base = m5c; note = sugar modification: lna
tgttcttgtacttcatcc

SEQ ID NO: 1359 - RNA, 18 nt, synthetic construct
  source 1..18: mol_type = other RNA; note = Antisense oligonucleotide
  modified_base 1: mod_base = OTHER; note = sugar modification: lna; note = thymine; note = backbone modification: 5'-phosphorothioate
  modified_base 2: mod_base = OTHER; note = sugar modification: 2-fluororibose; note = backbone modification: 5'-phosphorothioate
  modified_base 3: mod_base = OTHER; note = backbone modification: 5'-phosphorothioate; note = thymine; note = sugar modification: 2-fluororibose
  modified_base 4: mod_base = OTHER; note = sugar modification: 2-fluororibose; note = backbone modification: 5'-phosphorothioate; note = thymine
  modified_base 5: mod_base = OTHER; mod_base = m5c; note = backbone modification: 5'-phosphorothioate; note = sugar modification: 2-fluororibose
  modified_base 6: mod_base = OTHER; note = backbone modification: 5'-phosphorothioate; note = sugar modification: 2-fluororibose; note = thymine
  modified_base 7: mod_base = OTHER; note = thymine; note = backbone modification: 5'-phosphorothioate; note = sugar modification: 2-fluororibose
  modified_base 8: mod_base = OTHER; note = backbone modification: 5'-phosphorothioate; note = sugar modification: 2-fluororibose
  modified_base 9: mod_base = OTHER; note = thymine; note = sugar modification: 2-fluororibose; note = backbone modification: 5'-phosphorothioate
  modified_base 10: mod_base = OTHER; note = sugar modification: 2-fluororibose; note = backbone modification: 5'-phosphorothioate
  modified_base 11: mod_base = m5c; mod_base = OTHER; note = sugar modification: 2-fluororibose; note = backbone modification: 5'-phosphorothioate
  modified_base 12: mod_base = OTHER; note = backbone modification: 5'-phosphorothioate; note = thymine; note = sugar modification: 2-fluororibose
  modified_base 13: mod_base = OTHER; note = thymine; note = backbone modification: 5'-phosphorothioate; note = sugar modification: 2-fluororibose
  modified_base 14: mod_base = m5c; mod_base = OTHER; note = sugar modification: 2-fluororibose; note = backbone modification: 5'-phosphorothioate
  modified_base 15: mod_base = OTHER; note = sugar modification: 2'-O-methoxyethylribose; note = backbone modification: 5'-phosphorothioate
  modified_base 16: mod_base = OTHER; note = thymine; note = backbone modification: 5'-phosphorothioate; note = sugar modification: 2-fluororibose
  modified_base 17: mod_base = OTHER; mod_base = m5c; note = sugar modification: 2-fluororibose; note = backbone modification: 5'-phosphorothioate
  modified_base 18: mod_base = OTHER; mod_base = m5c; note = sugar modification: lna
tgttcttgtacttcatcc

SEQ ID NO: 1360 - RNA, 18 nt, synthetic construct
  source 1..18: mol_type = other RNA; note = Antisense oligonucleotide
  modified_base 1: mod_base = OTHER; note = thymine; note = sugar modification: lna; note = backbone modification: 5'-phosphorothioate
  modified_base 2: mod_base = OTHER; note = sugar modification: 2-fluororibose; note = backbone modification: 5'-phosphorothioate
  modified_base 3: mod_base = OTHER; note = backbone modification: 5'-phosphorothioate; note = thymine; note = sugar modification: 2-fluororibose
  modified_base 4: mod_base = OTHER; note = thymine; note = sugar modification: 2-fluororibose; note = backbone modification: 5'-phosphorothioate
  modified_base 5: mod_base = m5c; mod_base = OTHER; note = sugar modification: 2-fluororibose; note = backbone modification: 5'-phosphorothioate
  modified_base 6: mod_base = OTHER; note = sugar modification: 2-fluororibose; note = thymine; note = backbone modification: 5'-phosphorothioate
  modified_base 7: mod_base = OTHER; note = sugar modification: 2-fluororibose; note = backbone modification: 5'-phosphorothioate; note = thymine
  modified_base 8: mod_base = OTHER; note = backbone modification: 5'-phosphorothioate; note = sugar modification: 2-fluororibose
  modified_base 9: mod_base = OTHER; note = thymine; note = backbone modification: 5'-phosphorothioate; note = sugar modification: 2-fluororibose
  modified_base 10: mod_base = OTHER; note = sugar modification: 2-fluororibose; note = backbone modification: 5'-phosphorothioate
  modified_base 11: mod_base = OTHER; mod_base = m5c; note = backbone modification: 5'-phosphorothioate; note = sugar modification: 2-fluororibose
  modified_base 12: mod_base = OTHER; note = sugar modification: 2-fluororibose; note = thymine; note = backbone modification: 5'-phosphorothioate
  modified_base 13: mod_base = OTHER; note = thymine; note = sugar modification: 2-fluororibose; note = backbone modification: 5'-phosphorothioate
  modified_base 14: mod_base = m5c; mod_base = OTHER; note = sugar modification: 2-fluororibose; note = backbone modification: 5'-phosphorothioate
  modified_base 15: mod_base = OTHER; note = sugar modification: 2-fluororibose; note = backbone modification: 5'-phosphorothioate
  modified_base 16: mod_base = OTHER; note = backbone modification: 5'-phosphorothioate; note = thymine; note = sugar modification: 2'-O-methoxyethylribose
  modified_base 17: mod_base = m5c; mod_base = OTHER; note = sugar modification: 2-fluororibose; note = backbone modification: 5'-phosphorothioate
  modified_base 18: mod_base = m5c; mod_base = OTHER; note = sugar modification: lna
tgttcttgtacttcatcc

SEQ ID NO: 1361 - RNA, 18 nt, synthetic construct
  source 1..18: mol_type = other RNA; note = Antisense oligonucleotide
  modified_base 1: mod_base = OTHER; note = thymine; note = backbone modification: 5'-phosphorothioate; note = sugar modification: lna
  modified_base 2: mod_base = OTHER; note = sugar modification: 2-fluororibose; note = backbone modification: 5'-phosphorothioate
  modified_base 3: mod_base = OTHER; note = backbone modification: 5'-phosphorothioate; note = thymine; note = sugar modification: 2-fluororibose
  modified_base 4: mod_base = OTHER; note = sugar modification: 2-fluororibose; note = thymine; note = backbone modification: 5'-phosphorothioate
  modified_base 5: mod_base = m5c; mod_base = OTHER; note = backbone modification: 5'-phosphorothioate; note = sugar modification: 2-fluororibose
  modified_base 6: mod_base = OTHER; note = sugar modification: 2-fluororibose; note = backbone modification: 5'-phosphorothioate; note = thymine
  modified_base 7: mod_base = OTHER; note = thymine; note = backbone modification: 5'-phosphorothioate; note = sugar modification: 2-fluororibose
  modified_base 8: mod_base = OTHER; note = backbone modification: 5'-phosphorothioate; note = sugar modification: 2-fluororibose
  modified_base 9: mod_base = OTHER; note = sugar modification: 2-fluororibose; note = thymine; note = backbone modification: 5'-phosphorothioate
  modified_base 10: mod_base = OTHER; note = backbone modification: 5'-phosphorothioate; note = sugar modification: 2-fluororibose
  modified_base 11: mod_base = OTHER; mod_base = m5c; note = backbone modification: 5'-phosphorothioate; note = sugar modification: 2-fluororibose
  modified_base 12: mod_base = OTHER; note = backbone modification: 5'-phosphorothioate; note = sugar modification: 2-fluororibose; note = thymine
  modified_base 13: mod_base = OTHER; note = backbone modification: 5'-phosphorothioate; note = thymine; note = sugar modification: 2-fluororibose
  modified_base 14: mod_base = OTHER; mod_base = m5c; note = sugar modification: 2-fluororibose; note = backbone modification: 5'-phosphorothioate
  modified_base 15: mod_base = OTHER; note = sugar modification: 2-fluororibose; note = backbone modification: 5'-phosphorothioate
  modified_base 16: mod_base = OTHER; note = backbone modification: 5'-phosphorothioate; note = sugar modification: 2-fluororibose; note = thymine
  modified_base 17: mod_base = m5c; mod_base = OTHER; note = sugar modification: 2'-O-methoxyethylribose; note = backbone modification: 5'-phosphorothioate
  modified_base 18: mod_base = m5c; mod_base = OTHER; note = sugar modification: lna
tgttcttgtacttcatcc

SEQ ID NO: 1362 - RNA, 18 nt, synthetic construct
  source 1..18: mol_type = other RNA; note = Antisense oligonucleotide
  modified_base 1: mod_base = OTHER; note = thymine; note = sugar modification: lna; note = backbone modification: 5'-phosphorothioate
  modified_base 2: mod_base = OTHER; note = backbone modification: 5'-phosphorothioate; note = sugar modification: 2'-O-methoxyethylribose
  modified_base 3: mod_base = OTHER; note = backbone modification: 5'-phosphorothioate; note = thymine; note = sugar modification: 2'-O-methoxyethylribose
  modified_base 4: mod_base = OTHER; note = sugar modification: 2-fluororibose; note = backbone modification: 5'-phosphorothioate; note = thymine
  modified_base 5: mod_base = OTHER; mod_base = m5c; note = sugar modification: 2-fluororibose; note = backbone modification: 5'-phosphorothioate
  modified_base 6: mod_base = OTHER; note = sugar modification: 2-fluororibose; note = backbone modification: 5'-phosphorothioate; note = thymine
  modified_base 7: mod_base = OTHER; note = backbone modification: 5'-phosphorothioate; note = sugar modification: 2-fluororibose; note = thymine
  modified_base 8: mod_base = OTHER; note = backbone modification: 5'-phosphorothioate; note = sugar modification: 2-fluororibose
  modified_base 9: mod_base = OTHER; note = thymine; note = backbone modification: 5'-phosphorothioate; note = sugar modification: 2-fluororibose
  modified_base 10: mod_base = OTHER; note = sugar modification: 2'-O-methoxyethylribose; note = backbone modification: 5'-phosphorothioate
  modified_base 11: mod_base = m5c; mod_base = OTHER; note = sugar modification: 2'-O-methoxyethylribose; note = backbone modification: 5'-phosphorothioate
  modified_base 12: mod_base = OTHER; note = thymine; note = backbone modification: 5'-phosphorothioate; note = sugar modification: 2-fluororibose
  modified_base 13: mod_base = OTHER; note = thymine; note = sugar modification: 2-fluororibose; note = backbone modification: 5'-phosphorothioate
  modified_base 14: mod_base = OTHER; mod_base = m5c; note = backbone modification: 5'-phosphorothioate; note = sugar modification: 2-fluororibose
  modified_base 15: mod_base = OTHER; note = backbone modification: 5'-phosphorothioate; note = sugar modification: 2-fluororibose
  modified_base 16: mod_base = OTHER; note = sugar modification: 2'-O-methoxyethylribose; note = thymine; note = backbone modification: 5'-phosphorothioate
  modified_base 17: mod_base = OTHER; mod_base = m5c; note = backbone modification: 5'-phosphorothioate; note = sugar modification: 2'-O-methoxyethylribose
  modified_base 18: mod_base = m5c; mod_base = OTHER; note = sugar modification: lna
tgttcttgtacttcatcc

SEQ ID NO: 1363 - RNA, 18 nt, synthetic construct
  source 1..18: mol_type = other RNA; note = Antisense oligonucleotide
  modified_base 1: mod_base = OTHER; note = backbone modification: 5'-phosphorothioate; note = thymine; note = sugar modification: lna
  modified_base 2: mod_base = OTHER; note = sugar modification: 2'-O-methoxyethylribose; note = backbone modification: 5'-phosphorothioate
  modified_base 3: mod_base = OTHER; note = sugar modification: 2'-O-methoxyethylribose; note = backbone modification: 5'-phosphorothioate; note = thymine
  modified_base 4: mod_base = OTHER; note = backbone modification: 5'-phosphorothioate; note = sugar modification: 2-fluororibose; note = thymine
  modified_base 5: mod_base = OTHER; mod_base = m5c; note = backbone modification: 5'-phosphorothioate; note = sugar modification: 2-fluororibose
  modified_base 6: mod_base = OTHER; note = sugar modification: 2-fluororibose; note = thymine; note = backbone modification: 5'-phosphorothioate
  modified_base 7: mod_base = OTHER; note = thymine; note = sugar modification: 2-fluororibose; note = backbone modification: 5'-phosphorothioate
  modified_base 8: mod_base = OTHER; note = backbone modification: 5'-phosphorothioate; note = sugar modification: 2'-O-methoxyethylribose
  modified_base 9: mod_base = OTHER; note = thymine; note = sugar modification: 2'-O-methoxyethylribose; note = backbone modification: 5'-phosphorothioate
  modified_base 10: mod_base = OTHER; note = sugar modification: 2-fluororibose; note = backbone modification: 5'-phosphorothioate
  modified_base 11: mod_base = OTHER; mod_base = m5c; note = sugar modification: 2-fluororibose; note = backbone modification: 5'-phosphorothioate
  modified_base 12: mod_base = OTHER; note = sugar modification: 2-fluororibose; note = thymine; note = backbone modification: 5'-phosphorothioate
  modified_base 13: mod_base = OTHER; note = thymine; note = sugar modification: 2-fluororibose; note = backbone modification: 5'-phosphorothioate
  modified_base 14: mod_base = OTHER; mod_base = m5c; note = backbone modification: 5'-phosphorothioate; note = sugar modification: 2-fluororibose
  modified_base 15: mod_base = OTHER; note = backbone modification: 5'-phosphorothioate; note = sugar modification: 2-fluororibose
  modified_base 16: mod_base = OTHER; note = sugar modification: 2'-O-methoxyethylribose; note = thymine; note = backbone modification: 5'-phosphorothioate
  modified_base 17: mod_base = m5c; mod_base = OTHER; note = backbone modification: 5'-phosphorothioate; note = sugar modification: 2'-O-methoxyethylribose
  modified_base 18: mod_base = m5c; mod_base = OTHER; note = sugar modification: lna
tgttcttgtacttcatcc

SEQ ID NO: 1364 - RNA, 15 nt, synthetic construct
  source 1..15: mol_type = other RNA; note = Antisense oligonucleotide
  modified_base 1: mod_base = OTHER; note = backbone modification: 5'-phosphorothioate; note = sugar modification: lna
  modified_base 2: mod_base = OTHER; note = backbone modification: 5'-phosphorothioate; note = thymine; note = sugar modification: 2-fluororibose
  modified_base 3: mod_base = OTHER; note = sugar modification: 2-fluororibose; note = backbone modification: 5'-phosphorothioate
  modified_base 4: mod_base = OTHER; note = thymine; note = sugar modification: 2-fluororibose; note = backbone modification: 5'-phosphorothioate
  modified_base 5: mod_base = OTHER; note = sugar modification: 2-fluororibose; note = thymine; note = backbone modification: 5'-phosphorothioate
  modified_base 6: mod_base = m5c; mod_base = OTHER; note = backbone modification: 5'-phosphorothioate; note = sugar modification: 2-fluororibose
  modified_base 7: mod_base = OTHER; note = sugar modification: 2-fluororibose; note = thymine; note = backbone modification: 5'-phosphorothioate
  modified_base 8: mod_base = OTHER; note = backbone modification: 5'-phosphorothioate; note = thymine; note = sugar modification: 2-fluororibose
  modified_base 9: mod_base = OTHER; note = backbone modification: 5'-phosphorothioate; note = sugar modification: 2-fluororibose
  modified_base 10: mod_base = OTHER; note = thymine; note = sugar modification: 2-fluororibose; note = backbone modification: 5'-phosphorothioate
  modified_base 11: mod_base = OTHER; note = backbone modification: 5'-phosphorothioate; note = sugar modification: 2-fluororibose
  modified_base 12: mod_base = m5c; mod_base = OTHER; note = sugar modification: 2-fluororibose; note = backbone modification: 5'-phosphorothioate
  modified_base 13: mod_base = OTHER; note = backbone modification: 5'-phosphorothioate; note = sugar modification: 2-fluororibose; note = thymine
  modified_base 14: mod_base = OTHER; note = sugar modification: 2-fluororibose; note = thymine; note = backbone modification: 5'-phosphorothioate
  modified_base 15: mod_base = m5c; mod_base = OTHER; note = sugar modification: lna
gtgttcttgtacttc

SEQ ID NO: 1365 - RNA, 15 nt, synthetic construct
  source 1..15: mol_type = other RNA; note = Antisense oligonucleotide
  modified_base 1: mod_base = OTHER; note = backbone modification: 5'-phosphorothioate; note = sugar modification: lna
  modified_base 2: mod_base = OTHER; note = thymine; note = sugar modification: 2'-O-methoxyethylribose; note = backbone modification: 5'-phosphorothioate
  modified_base 3: mod_base = OTHER; note = backbone modification: 5'-phosphorothioate; note = sugar modification: 2-fluororibose
  modified_base 4: mod_base = OTHER; note = sugar modification: 2-fluororibose; note = backbone modification: 5'-phosphorothioate; note = thymine
  modified_base 5: mod_base = OTHER; note = sugar modification: 2-fluororibose; note = thymine; note = backbone modification: 5'-phosphorothioate
  modified_base 6: mod_base = OTHER; mod_base = m5c; note = backbone modification: 5'-phosphorothioate; note = sugar modification: 2-fluororibose
  modified_base 7: mod_base = OTHER; note = sugar modification: 2-fluororibose; note = thymine; note = backbone modification: 5'-phosphorothioate
  modified_base 8: mod_base = OTHER; note = backbone modification: 5'-phosphorothioate; note = thymine; note = sugar modification: 2-fluororibose
  modified_base 9: mod_base = OTHER; note = sugar modification: 2-fluororibose; note = backbone modification: 5'-phosphorothioate
  modified_base 10: mod_base = OTHER; note = thymine; note = backbone modification: 5'-phosphorothioate; note = sugar modification: 2-fluororibose
  modified_base 11: mod_base = OTHER; note = backbone modification: 5'-phosphorothioate; note = sugar modification: 2-fluororibose
  modified_base 12: mod_base = m5c; mod_base = OTHER; note = sugar modification: 2-fluororibose; note = backbone modification: 5'-phosphorothioate
  modified_base 13: mod_base = OTHER; note = backbone modification: 5'-phosphorothioate; note = thymine; note = sugar modification: 2-fluororibose
  modified_base 14: mod_base = OTHER; note = backbone modification: 5'-phosphorothioate; note = thymine; note = sugar modification: 2'-O-methoxyethylribose
  modified_base 15: mod_base = m5c; mod_base = OTHER; note = sugar modification: lna
gtgttcttgtacttc

SEQ ID NO: 1366 - RNA, 15 nt, synthetic construct
  source 1..15: mol_type = other RNA; note = Antisense oligonucleotide
  modified_base 1: mod_base = OTHER; note = backbone modification: 5'-phosphorothioate; note = sugar modification: lna
  modified_base 2: mod_base = OTHER; note = thymine; note = sugar modification: 2'-O-methoxyethylribose; note = backbone modification: 5'-phosphorothioate
  modified_base 3: mod_base = OTHER; note = backbone modification: 5'-phosphorothioate; note = sugar modification: 2'-O-methoxyethylribose
  modified_base 4: mod_base = OTHER; note = thymine; note = backbone modification: 5'-phosphorothioate; note = sugar modification: 2-fluororibose
  modified_base 5: mod_base = OTHER; note = backbone modification: 5'-phosphorothioate; note = thymine; note = sugar modification: 2-fluororibose
  modified_base 6: mod_base = OTHER; mod_base = m5c; note = backbone modification: 5'-phosphorothioate; note = sugar modification: 2-fluororibose
  modified_base 7: mod_base = OTHER; note = sugar modification: 2-fluororibose; note = backbone modification: 5'-phosphorothioate; note = thymine
  modified_base 8: mod_base = OTHER; note = backbone modification: 5'-phosphorothioate; note = sugar modification: 2-fluororibose; note = thymine
  modified_base 9: mod_base = OTHER; note = backbone modification: 5'-phosphorothioate; note = sugar modification: 2-fluororibose
  modified_base 10: mod_base = OTHER; note = sugar modification: 2-fluororibose; note = thymine; note = backbone modification: 5'-phosphorothioate
  modified_base 11: mod_base = OTHER; note = backbone modification: 5'-phosphorothioate; note = sugar modification: 2-fluororibose
  modified_base 12: mod_base = m5c; mod_base = OTHER; note = sugar modification: 2-fluororibose; note = backbone modification: 5'-phosphorothioate
  modified_base 13: mod_base = OTHER; note = thymine; note = sugar modification: 2'-O-methoxyethylribose; note = backbone modification: 5'-phosphorothioate
  modified_base 14: mod_base = OTHER; note = thymine; note = backbone modification: 5'-phosphorothioate; note = sugar modification: 2'-O-methoxyethylribose
  modified_base 15: mod_base = m5c; mod_base = OTHER; note = sugar modification: lna
gtgttcttgtacttc

SEQ ID NO: 1367 - RNA, 15 nt, synthetic construct
  source 1..15: mol_type = other RNA; note = Antisense oligonucleotide
  modified_base 1: mod_base = OTHER; note = sugar modification: lna; note = backbone modification: 5'-phosphorothioate
  modified_base 2: mod_base = OTHER; note = thymine; note = backbone modification: 5'-phosphorothioate; note = sugar modification: 2'-O-methoxyethylribose
  modified_base 3: mod_base = OTHER; note = sugar modification: 2'-O-methoxyethylribose; note = backbone modification: 5'-phosphorothioate
  modified_base 4: mod_base = OTHER; note = sugar modification: 2'-O-methoxyethylribose; note = backbone modification: 5'-phosphorothioate; note = thymine
  modified_base 5: mod_base = OTHER; note = backbone modification: 5'-phosphorothioate; note = thymine; note = sugar modification: 2-fluororibose
  modified_base 6: mod_base = m5c; mod_base = OTHER; note = backbone modification: 5'-phosphorothioate; note = sugar modification: 2-fluororibose
  modified_base 7: mod_base = OTHER; note = sugar modification: 2-fluororibose; note = thymine; note = backbone modification: 5'-phosphorothioate
  modified_base 8: mod_base = OTHER; note = thymine; note = backbone modification: 5'-phosphorothioate; note = sugar modification: 2-fluororibose
  modified_base 9: mod_base = OTHER; note = sugar modification: 2-fluororibose; note = backbone modification: 5'-phosphorothioate
  modified_base 10: mod_base = OTHER; note = backbone modification: 5'-phosphorothioate; note = thymine; note = sugar modification: 2-fluororibose
  modified_base 11: mod_base = OTHER; note = sugar modification: 2-fluororibose; note = backbone modification: 5'-phosphorothioate
  modified_base 12: mod_base = m5c; mod_base = OTHER; note = sugar modification: 2'-O-methoxyethylribose; note = backbone modification: 5'-phosphorothioate
  modified_base 13: mod_base = OTHER; note = thymine; note = sugar modification: 2'-O-methoxyethylribose; note = backbone modification: 5'-phosphorothioate
  modified_base 14: mod_base = OTHER; note = thymine; note = backbone modification: 5'-phosphorothioate; note = sugar modification: 2'-O-methoxyethylribose
  modified_base 15: mod_base = OTHER; mod_base = m5c; note = sugar modification: lna
gtgttcttgtacttc

SEQ ID NO: 1368 - RNA, 15 nt, synthetic construct
  source 1..15: mol_type = other RNA; note = Antisense oligonucleotide
  modified_base 1: mod_base = OTHER; note = sugar modification: lna; note = backbone modification: 5'-phosphorothioate
  modified_base 2: mod_base = OTHER; note = backbone modification: 5'-phosphorothioate; note = sugar modification: 2'-O-methoxyethylribose; note = thymine
  modified_base 3: mod_base = OTHER; note = backbone modification: 5'-phosphorothioate; note = sugar modification: 2'-O-methoxyethylribose
  modified_base 4: mod_base = OTHER; note = thymine; note = sugar modification: 2'-O-methoxyethylribose; note = backbone modification: 5'-phosphorothioate
  modified_base 5: mod_base = OTHER; note = sugar modification: 2'-O-methoxyethylribose; note = thymine; note = backbone modification: 5'-phosphorothioate
  modified_base 6: mod_base = m5c; mod_base = OTHER; note = sugar modification: 2-fluororibose; note = backbone modification: 5'-phosphorothioate
  modified_base 7: mod_base = OTHER; note = backbone modification: 5'-phosphorothioate; note = sugar modification: 2-fluororibose; note = thymine
  modified_base 8: mod_base = OTHER; note = backbone modification: 5'-phosphorothioate; note = sugar modification: 2-fluororibose; note = thymine
  modified_base 9: mod_base = OTHER; note = sugar modification: 2-fluororibose; note = backbone modification: 5'-phosphorothioate
  modified_base 10: mod_base = OTHER; note = thymine; note = sugar modification: 2-fluororibose; note = backbone modification: 5'-phosphorothioate
  modified_base 11: mod_base = OTHER; note = backbone modification: 5'-phosphorothioate; note = sugar modification: 2'-O-methoxyethylribose
  modified_base 12: mod_base = m5c; mod_base = OTHER; note = sugar modification: 2'-O-methoxyethylribose; note = backbone modification: 5'-phosphorothioate
  modified_base 13: mod_base = OTHER; note = backbone modification: 5'-phosphorothioate; note = thymine; note = sugar modification: 2'-O-methoxyethylribose
  modified_base 14: mod_base = OTHER; note = backbone modification: 5'-phosphorothioate; note = sugar modification: 2'-O-methoxyethylribose; note = thymine
  modified_base 15: mod_base = OTHER; mod_base = m5c; note = sugar modification: lna
gtgttcttgtacttc

SEQ ID NO: 1369 - RNA, 15 nt, synthetic construct
  source 1..15: mol_type = other RNA; note = Antisense oligonucleotide
  modified_base 1: mod_base = OTHER; note = backbone modification: 5'-phosphorothioate; note = sugar modification: lna
  modified_base 2: mod_base = OTHER; note = thymine; note = sugar modification: 2-fluororibose; note = backbone modification: 5'-phosphorothioate
  modified_base 3: mod_base = OTHER; note = sugar modification: 2-fluororibose; note = backbone modification: 5'-phosphorothioate
  modified_base 4: mod_base = OTHER; note = sugar modification: 2-fluororibose; note = thymine; note = backbone modification: 5'-phosphorothioate
  modified_base 5: mod_base = OTHER; note = sugar modification: 2-fluororibose; note = backbone modification: 5'-phosphorothioate; note = thymine
  modified_base 6: mod_base = OTHER; mod_base = m5c; note = backbone modification: 5'-phosphorothioate; note = sugar modification: 2-fluororibose
  modified_base 7: mod_base = OTHER; note = thymine; note = backbone modification: 5'-phosphorothioate; note = sugar modification: 2'-O-methoxyethylribose
  modified_base 8: mod_base = OTHER; note = sugar modification: 2'-O-methoxyethylribose; note = thymine; note = backbone modification: 5'-phosphorothioate
  modified_base 9: mod_base = OTHER; note = backbone modification: 5'-phosphorothioate; note = sugar modification: 2'-O-methoxyethylribose
  modified_base 10: mod_base = OTHER; note = backbone modification: 5'-phosphorothioate; note = thymine; note = sugar modification: 2-fluororibose
  modified_base 11: mod_base = OTHER; note = backbone modification: 5'-phosphorothioate; note = sugar modification: 2-fluororibose
  modified_base 12: mod_base = m5c; mod_base = OTHER; note = backbone modification: 5'-phosphorothioate; note = sugar modification: 2-fluororibose
  modified_base 13: mod_base = OTHER; note = backbone modification: 5'-phosphorothioate; note = thymine; note = sugar modification: 2-fluororibose
  modified_base 14: mod_base = OTHER; note = backbone modification: 5'-phosphorothioate; note = sugar modification: 2-fluororibose; note = thymine
  modified_base 15: mod_base = m5c; mod_base = OTHER; note = sugar modification: lna
gtgttcttgtacttc

SEQ ID NO: 1370 - RNA, 15 nt, synthetic construct
  source 1..15: mol_type = other RNA; note = Antisense oligonucleotide
  modified_base 1: mod_base = OTHER; note = backbone modification: 5'-phosphorothioate; note = sugar modification: lna
  modified_base 2: mod_base = OTHER; note = backbone modification: 5'-phosphorothioate; note = sugar modification: 2'-O-methoxyethylribose; note = thymine
  modified_base 3: mod_base = OTHER; note = sugar modification: 2-fluororibose; note = backbone modification: 5'-phosphorothioate
  modified_base 4: mod_base = OTHER; note = sugar modification: 2-fluororibose; note = thymine; note = backbone modification: 5'-phosphorothioate
  modified_base 5: mod_base = OTHER; note = backbone modification: 5'-phosphorothioate; note = sugar modification: 2-fluororibose; note = thymine
  modified_base 6: mod_base = m5c; mod_base = OTHER; note = backbone modification: 5'-phosphorothioate; note = sugar modification: 2-fluororibose
  modified_base 7: mod_base = OTHER; note = sugar modification: 2-fluororibose; note = thymine; note = backbone modification: 5'-phosphorothioate
  modified_base 8: mod_base = OTHER; note = thymine; note = sugar modification: 2'-O-methoxyethylribose; note = backbone modification: 5'-phosphorothioate
  modified_base 9: mod_base = OTHER; note = sugar modification: 2-fluororibose; note = backbone modification: 5'-phosphorothioate
  modified_base 10: mod_base = OTHER; note = sugar modification: 2-fluororibose; note = thymine; note = backbone modification: 5'-phosphorothioate
  modified_base 11: mod_base = OTHER; note = backbone modification: 5'-phosphorothioate; note = sugar modification: 2-fluororibose
  modified_base 12: mod_base = m5c; mod_base = OTHER; note = sugar modification: 2-fluororibose; note = backbone modification: 5'-phosphorothioate
  modified_base 13: mod_base = OTHER; note = backbone modification: 5'-phosphorothioate; note = sugar modification: 2-fluororibose; note = thymine
  modified_base 14: mod_base = OTHER; note = backbone modification: 5'-phosphorothioate; note = sugar modification: 2'-O-methoxyethylribose; note = thymine
  modified_base 15: mod_base = m5c; mod_base = OTHER; note = sugar modification: lna
gtgttcttgtacttc

SEQ ID NO: 1371 - RNA, 15 nt, synthetic construct
  source 1..15: mol_type = other RNA; note = Antisense oligonucleotide
  modified_base 1: mod_base = OTHER; note = backbone modification: 5'-phosphorothioate; note = sugar modification: lna
  modified_base 2: mod_base = OTHER; note = sugar modification: 2'-O-methoxyethylribose; note = thymine; note = backbone modification: 5'-phosphorothioate
  modified_base 3: mod_base = OTHER; note = sugar modification: 2-fluororibose; note = backbone modification: 5'-phosphorothioate
  modified_base 4: mod_base = OTHER; note = backbone modification: 5'-phosphorothioate; note = thymine; note = sugar modification: 2-fluororibose
  modified_base 5: mod_base = OTHER; note = backbone modification: 5'-phosphorothioate; note = thymine; note = sugar modification: 2-fluororibose
  modified_base 6: mod_base = m5c; mod_base = OTHER; note = backbone modification: 5'-phosphorothioate; note = sugar modification: 2-fluororibose
  modified_base 7: mod_base = OTHER; note = sugar modification: 2'-O-methoxyethylribose; note = thymine; note = backbone modification: 5'-phosphorothioate
  modified_base 8: mod_base = OTHER; note = sugar modification: 2'-O-methoxyethylribose; note = thymine; note = backbone modification: 5'-phosphorothioate
  modified_base 9: mod_base = OTHER; note = backbone modification: 5'-phosphorothioate; note = sugar modification: 2'-O-methoxyethylribose
  modified_base 10: mod_base = OTHER; note = sugar modification: 2-fluororibose; note = backbone modification: 5'-phosphorothioate; note = thymine
  modified_base 11: mod_base = OTHER; note = sugar modification: 2-fluororibose; note = backbone modification: 5'-phosphorothioate
  modified_base 12: mod_base = OTHER; mod_base = m5c; note = backbone modification: 5'-phosphorothioate; note = sugar modification: 2-fluororibose
  modified_base 13: mod_base = OTHER; note = sugar modification: 2-fluororibose; note = backbone modification: 5'-phosphorothioate; note = thymine
  modified_base 14: mod_base = OTHER; note = thymine; note = backbone modification: 5'-phosphorothioate; note = sugar modification: 2'-O-methoxyethylribose
  modified_base 15: mod_base = OTHER; mod_base = m5c; note = sugar modification: lna
gtgttcttgtacttc

SEQ ID NO: 1372 - RNA, 15 nt, synthetic construct
  source 1..15: mol_type = other RNA; note = Antisense oligonucleotide
  modified_base 1: mod_base = OTHER; note = sugar modification: lna; note = backbone modification: 5'-phosphorothioate
  modified_base 2: mod_base = OTHER; note = thymine; note = sugar modification: 2'-O-methoxyethylribose; note = backbone modification: 5'-phosphorothioate
  modified_base 3: mod_base = OTHER; note = sugar modification: 2'-O-methoxyethylribose; note = backbone modification: 5'-phosphorothioate
  modified_base 4: mod_base = OTHER; note = backbone modification: 5'-phosphorothioate; note = thymine; note = sugar modification: 2-fluororibose
  modified_base 5: mod_base = OTHER; note = sugar modification: 2-fluororibose; note = backbone modification: 5'-phosphorothioate; note = thymine
  modified_base 6: mod_base = OTHER; mod_base = m5c; note = sugar modification: 2-fluororibose; note = backbone modification: 5'-phosphorothioate
  modified_base 7: mod_base = OTHER; note = backbone modification: 5'-phosphorothioate; note = sugar modification: 2-fluororibose; note = thymine
  modified_base 8: mod_base = OTHER; note = thymine; note = backbone modification: 5'-phosphorothioate; note = sugar modification: 2'-O-methoxyethylribose
  modified_base 9: mod_base = OTHER; note = sugar modification: 2-fluororibose; note = backbone modification: 5'-phosphorothioate
  modified_base 10: mod_base = OTHER; note = thymine; note = backbone modification: 5'-phosphorothioate; note = sugar modification: 2-fluororibose
  modified_base 11: mod_base = OTHER; note = sugar modification: 2-fluororibose; note = backbone modification: 5'-phosphorothioate
  modified_base 12: mod_base = OTHER; mod_base = m5c; note = sugar modification: 2-fluororibose; note = backbone modification: 5'-phosphorothioate
  modified_base 13: mod_base = OTHER; note = thymine; note = sugar modification: 2'-O-methoxyethylribose; note = backbone modification: 5'-phosphorothioate
  modified_base 14: mod_base = OTHER; note = sugar modification: 2'-O-methoxyethylribose; note = backbone modification: 5'-phosphorothioate; note = thymine
  modified_base 15: mod_base = OTHER; mod_base = m5c; note = sugar modification: lna
gtgttcttgtacttc

SEQ ID NO: 1373 - RNA, 15 nt, synthetic construct
  source 1..15: mol_type = other RNA; note = Antisense oligonucleotide
  modified_base 1: mod_base = OTHER; note = sugar modification: lna; note = backbone modification: 5'-phosphorothioate
  modified_base 2: mod_base = OTHER; note = thymine; note = sugar modification: 2-fluororibose; note = backbone modification: 5'-phosphorothioate
  modified_base 3: mod_base = OTHER; note = backbone modification: 5'-phosphorothioate; note = sugar modification: 2-fluororibose
  modified_base 4: mod_base = OTHER; note = sugar modification: 2-fluororibose; note = thymine; note = backbone modification: 5'-phosphorothioate
  modified_base 5: mod_base = OTHER; note = backbone modification: 5'-phosphorothioate; note = sugar modification: 2-fluororibose; note = thymine
  modified_base 6: mod_base = OTHER; mod_base = m5c; note = sugar modification: 2'-O-methoxyethylribose; note = backbone modification: 5'-phosphorothioate
  modified_base 7: mod_base = OTHER; note = backbone modification: 5'-phosphorothioate; note = thymine; note = sugar modification: 2'-O-methoxyethylribose
  modified_base 8: mod_base = OTHER; note = backbone modification: 5'-phosphorothioate; note = thymine; note = sugar modification: 2'-O-methoxyethylribose
  modified_base 9: mod_base = OTHER; note = sugar modification: 2'-O-methoxyethylribose; note = backbone modification: 5'-phosphorothioate
  modified_base 10: mod_base = OTHER; note = backbone modification: 5'-phosphorothioate; note = thymine; note = sugar modification: 2'-O-methoxyethylribose
  modified_base 11: mod_base = OTHER; note = backbone modification: 5'-phosphorothioate; note = sugar modification: 2-fluororibose
  modified_base 12: mod_base = OTHER; mod_base = m5c; note = backbone modification: 5'-phosphorothioate; note = sugar modification: 2-fluororibose
  modified_base 13: mod_base = OTHER; note = sugar modification: 2-fluororibose; note = backbone modification: 5'-phosphorothioate; note = thymine
  modified_base 14: mod_base = OTHER; note = thymine; note = sugar modification: 2-fluororibose; note = backbone modification: 5'-phosphorothioate
  modified_base 15: mod_base = m5c; mod_base = OTHER; note = sugar modification: lna
gtgttcttgtacttc

SEQ ID NO: 1374 - RNA, 15 nt, synthetic construct
  source 1..15: mol_type = other RNA; note = Antisense oligonucleotide
  modified_base 1: mod_base = m5c; mod_base = OTHER; note = backbone modification: 5'-phosphorothioate; note = sugar modification: lna
  modified_base 2: mod_base = OTHER; note = thymine; note = sugar modification: 2-fluororibose; note = backbone modification: 5'-phosphorothioate
  modified_base 3: mod_base = OTHER; note = backbone modification: 5'-phosphorothioate; note = thymine; note = sugar modification: 2-fluororibose
  modified_base 4: mod_base = OTHER; note = sugar modification: 2-fluororibose; note = backbone modification: 5'-phosphorothioate
  modified_base 5: mod_base = OTHER; note = sugar modification: 2-fluororibose; note = backbone modification: 5'-phosphorothioate; note = thymine
  modified_base 6: mod_base = OTHER; note = sugar modification: 2-fluororibose; note = backbone modification: 5'-phosphorothioate
  modified_base 7: mod_base = m5c; mod_base = OTHER; note = backbone modification: 5'-phosphorothioate; note = sugar modification: 2-fluororibose
  modified_base 8: mod_base = OTHER; note = backbone modification: 5'-phosphorothioate; note = sugar modification: 2-fluororibose; note = thymine
  modified_base 9: mod_base = OTHER; note = backbone modification: 5'-phosphorothioate; note = sugar modification: 2-fluororibose; note = thymine
  modified_base 10: mod_base = m5c; mod_base = OTHER; note = sugar modification: 2-fluororibose; note = backbone modification: 5'-phosphorothioate
  modified_base 11: mod_base = OTHER; note = backbone modification: 5'-phosphorothioate; note = sugar modification: 2-fluororibose
  modified_base 12: mod_base = OTHER; note = backbone modification: 5'-phosphorothioate; note = thymine; note = sugar modification: 2-fluororibose
  modified_base 13: mod_base = OTHER; mod_base = m5c; note = sugar modification: 2-fluororibose; note = backbone modification: 5'-phosphorothioate
  modified_base 14: mod_base = OTHER; mod_base = m5c; note = sugar modification: 2-fluororibose; note = backbone modification: 5'-phosphorothioate
  modified_base 15: mod_base = m5c; mod_base = OTHER; note = sugar modification: lna
cttgtacttcatccc

SEQ ID NO: 1375 - RNA, 15 nt, synthetic construct
  source 1..15: mol_type = other RNA; note = Antisense oligonucleotide
  modified_base 1: mod_base = m5c; mod_base = OTHER; note = sugar modification: lna; note = backbone modification: 5'-phosphorothioate
  modified_base 2: mod_base = OTHER; note = backbone modification: 5'-phosphorothioate; note = thymine; note = sugar modification: 2'-O-methoxyethylribose
  modified_base 3: mod_base = OTHER; note = backbone modification: 5'-phosphorothioate; note = thymine; note = sugar modification: 2-fluororibose
  modified_base 4: mod_base = OTHER; note = backbone modification: 5'-phosphorothioate; note = sugar modification: 2-fluororibose
  modified_base 5: mod_base = OTHER; note = sugar modification: 2-fluororibose; note = thymine; note = backbone modification: 5'-phosphorothioate
  modified_base 6: mod_base = OTHER; note = backbone modification: 5'-phosphorothioate; note = sugar modification: 2-fluororibose
  modified_base 7: mod_base = m5c; mod_base = OTHER; note = sugar modification: 2-fluororibose; note = backbone modification: 5'-phosphorothioate
  modified_base 8: mod_base = OTHER; note = backbone modification: 5'-phosphorothioate; note = thymine; note = sugar modification: 2-fluororibose
  modified_base 9: mod_base = OTHER; note = thymine; note = backbone modification: 5'-phosphorothioate; note = sugar modification: 2-fluororibose
  modified_base 10: mod_base = m5c; mod_base = OTHER; note = backbone modification: 5'-phosphorothioate; note = sugar modification: 2-fluororibose
  modified_base 11: mod_base = OTHER; note = sugar modification: 2-fluororibose; note = backbone modification: 5'-phosphorothioate
  modified_base 12: mod_base = OTHER; note = sugar modification: 2-fluororibose; note = thymine; note = backbone modification: 5'-phosphorothioate
  modified_base 13: mod_base = OTHER; mod_base = m5c; note = sugar modification: 2-fluororibose; note = backbone modification: 5'-phosphorothioate
  modified_base 14: mod_base = m5c; mod_base = OTHER; note = sugar modification: 2'-O-methoxyethylribose; note = backbone modification: 5'-phosphorothioate
  modified_base 15: mod_base = m5c; mod_base = OTHER; note = sugar modification: lna
cttgtacttcatccc

SEQ ID NO: 1376 - RNA, 15 nt, synthetic construct
  source 1..15: mol_type = other RNA; note = Antisense oligonucleotide
  modified_base 1: mod_base = OTHER; mod_base = m5c; note = sugar modification: lna; note = backbone modification: 5'-phosphorothioate
  modified_base 2: mod_base = OTHER; note = thymine; note = sugar modification: 2'-O-methoxyethylribose; note = backbone modification: 5'-phosphorothioate
  modified_base 3: mod_base = OTHER; note = sugar modification: 2'-O-methoxyethylribose; note = backbone modification: 5'-phosphorothioate; note = thymine
  modified_base 4: mod_base = OTHER; note = backbone modification: 5'-phosphorothioate; note = sugar modification: 2-fluororibose
  modified_base 5: mod_base = OTHER; note = sugar modification: 2-fluororibose; note = thymine; note = backbone modification: 5'-phosphorothioate
  modified_base 6: mod_base = OTHER; note = sugar modification: 2-fluororibose; note = backbone modification: 5'-phosphorothioate
  modified_base 7: mod_base = OTHER; mod_base = m5c; note = backbone modification: 5'-phosphorothioate; note = sugar modification: 2-fluororibose
  modified_base 8: mod_base = OTHER; note = backbone modification: 5'-phosphorothioate; note = thymine; note = sugar modification: 2-fluororibose
  modified_base 9: mod_base = OTHER; note = sugar modification: 2-fluororibose; note = thymine; note = backbone modification: 5'-phosphorothioate
  modified_base 10: mod_base = m5c; mod_base = OTHER; note = sugar modification: 2-fluororibose; note = backbone modification: 5'-phosphorothioate
  modified_base 11: mod_base = OTHER; note = backbone modification: 5'-phosphorothioate; note = sugar modification: 2-fluororibose
  modified_base 12: mod_base = OTHER; note = thymine; note = backbone modification: 5'-phosphorothioate; note = sugar modification: 2-fluororibose
  modified_base 13: mod_base = OTHER; mod_base = m5c; note = sugar modification: 2'-O-methoxyethylribose; note = backbone modification: 5'-phosphorothioate
  modified_base 14: mod_base = OTHER; mod_base = m5c; note = sugar modification: 2'-O-methoxyethylribose; note = backbone modification: 5'-phosphorothioate
  modified_base 15: mod_base = OTHER; mod_base = m5c; note = sugar modification: lna
cttgtacttcatccc

SEQ ID NO: 1377 - RNA, 15 nt, synthetic construct
  source 1..15: mol_type = other RNA; note = Antisense oligonucleotide
  modified_base 1: mod_base = m5c; mod_base = OTHER; note = sugar modification: lna; note = backbone modification: 5'-phosphorothioate
  modified_base 2: mod_base = OTHER; note = sugar modification: 2'-O-methoxyethylribose; note = backbone modification: 5'-phosphorothioate; note = thymine
  modified_base 3: mod_base = OTHER; note = thymine; note = sugar modification: 2'-O-methoxyethylribose; note = backbone modification: 5'-phosphorothioate
  modified_base 4: mod_base = OTHER; note = backbone modification: 5'-phosphorothioate; note = sugar modification: 2'-O-methoxyethylribose
  modified_base 5: mod_base = OTHER; note = backbone modification: 5'-phosphorothioate; note = thymine; note = sugar modification: 2-fluororibose
  modified_base 6: mod_base = OTHER; note = sugar modification: 2-fluororibose; note = backbone modification: 5'-phosphorothioate
  modified_base 7: mod_base = m5c; mod_base = OTHER; note = sugar modification: 2-fluororibose; note = backbone modification: 5'-phosphorothioate
  modified_base 8: mod_base = OTHER; note = sugar modification: 2-fluororibose; note = backbone modification: 5'-phosphorothioate; note = thymine
  modified_base 9: mod_base = OTHER; note = thymine; note = sugar modification: 2-fluororibose; note = backbone modification: 5'-phosphorothioate
  modified_base 10: mod_base = OTHER; mod_base = m5c; note = sugar modification: 2-fluororibose; note = backbone modification: 5'-phosphorothioate
  modified_base 11: mod_base = OTHER; note = backbone modification: 5'-phosphorothioate; note = sugar modification: 2-fluororibose
  modified_base 12: mod_base = OTHER; note = backbone modification: 5'-phosphorothioate; note = thymine; note = sugar modification: 2'-O-methoxyethylribose
  modified_base 13: mod_base = OTHER; mod_base = m5c; note = sugar modification: 2'-O-methoxyethylribose; note = backbone modification: 5'-phosphorothioate
  modified_base 14: mod_base = m5c; mod_base = OTHER; note = sugar modification: 2'-O-methoxyethylribose; note = backbone modification: 5'-phosphorothioate
  modified_base 15: mod_base = OTHER; mod_base = m5c; note = sugar modification: lna
cttgtacttcatccc

SEQ ID NO: 1378 - RNA, 15 nt, synthetic construct
  source 1..15: mol_type = other RNA; note = Antisense oligonucleotide
  modified_base 1: mod_base = m5c; mod_base = OTHER; note = sugar modification: lna; note = backbone modification: 5'-phosphorothioate
  modified_base 2: mod_base = OTHER; note = sugar modification: 2'-O-methoxyethylribose; note = thymine; note = backbone modification: 5'-phosphorothioate
  modified_base 3: mod_base = OTHER; note = thymine; note = backbone modification: 5'-phosphorothioate; note = sugar modification: 2'-O-methoxyethylribose
  modified_base 4: mod_base = OTHER; note = sugar modification: 2'-O-methoxyethylribose; note = backbone modification: 5'-phosphorothioate
  modified_base 5: mod_base = OTHER; note = sugar modification: 2'-O-methoxyethylribose; note = thymine; note = backbone modification: 5'-phosphorothioate
  modified_base 6: mod_base = OTHER; note = sugar modification: 2-fluororibose; note = backbone modification: 5'-phosphorothioate
  modified_base 7: mod_base = OTHER; mod_base = m5c; note = sugar modification: 2-fluororibose; note = backbone modification: 5'-phosphorothioate
  modified_base 8: mod_base = OTHER; note = thymine; note = sugar modification: 2-fluororibose; note = backbone modification: 5'-phosphorothioate
  modified_base 9: mod_base = OTHER; note = sugar modification: 2-fluororibose; note = backbone modification: 5'-phosphorothioate; note = thymine
  modified_base 10: mod_base = OTHER; mod_base = m5c; note = backbone modification: 5'-phosphorothioate; note = sugar modification: 2-fluororibose
  modified_base 11: mod_base = OTHER; note = sugar modification: 2'-O-methoxyethylribose; note = backbone modification: 5'-phosphorothioate
  modified_base 12: mod_base = OTHER; note = thymine; note = sugar modification: 2'-O-methoxyethylribose; note = backbone modification: 5'-phosphorothioate
  modified_base 13: mod_base = m5c; mod_base = OTHER; note = backbone modification: 5'-phosphorothioate; note = sugar modification: 2'-O-methoxyethylribose
  modified_base 14: mod_base = OTHER; mod_base = m5c; note = sugar modification: 2'-O-methoxyethylribose; note = backbone modification: 5'-phosphorothioate
  modified_base 15: mod_base = OTHER; mod_base = m5c; note = sugar modification: lna
cttgtacttcatccc

SEQ ID NO: 1379 - RNA, 15 nt, synthetic construct
  source 1..15: mol_type = other RNA; note = Antisense oligonucleotide
  modified_base 1: mod_base = m5c; mod_base = OTHER; note = sugar modification: lna; note = backbone modification: 5'-phosphorothioate
  modified_base 2: mod_base = OTHER; note = sugar modification: 2-fluororibose; note = backbone modification: 5'-phosphorothioate; note = thymine
  modified_base 3: mod_base = OTHER; note = backbone modification: 5'-phosphorothioate; note = thymine; note = sugar modification: 2-fluororibose
  modified_base 4: mod_base = OTHER; note = backbone modification: 5'-phosphorothioate; note = sugar modification: 2-fluororibose
  modified_base 5: mod_base = OTHER; note = backbone modification: 5'-phosphorothioate; note = thymine; note = sugar modification: 2-fluororibose
  modified_base 6: mod_base = OTHER; note = sugar modification: 2-fluororibose; note = backbone modification: 5'-phosphorothioate
  modified_base 7: mod_base = OTHER; mod_base = m5c; note = sugar modification: 2'-O-methoxyethylribose; note = backbone modification: 5'-phosphorothioate
  modified_base 8: mod_base = OTHER; note = thymine; note = backbone modification: 5'-phosphorothioate; note = sugar modification: 2'-O-methoxyethylribose
  modified_base 9: mod_base = OTHER; note = backbone modification: 5'-phosphorothioate; note = thymine; note = sugar modification: 2'-O-methoxyethylribose
  modified_base 10: mod_base = OTHER; mod_base = m5c; note = sugar modification: 2-fluororibose; note = backbone modification: 5'-phosphorothioate
  modified_base 11: mod_base = OTHER; note = backbone modification: 5'-phosphorothioate; note = sugar modification: 2-fluororibose
  modified_base 12: mod_base = OTHER; note = backbone modification: 5'-phosphorothioate; note = thymine; note = sugar modification: 2-fluororibose
  modified_base 13: mod_base = OTHER; mod_base = m5c; note = sugar modification: 2-fluororibose; note = backbone modification: 5'-phosphorothioate
  modified_base 14: mod_base = m5c; mod_base = OTHER; note = backbone modification: 5'-phosphorothioate; note = sugar modification: 2-fluororibose
  modified_base 15: mod_base = OTHER; mod_base = m5c; note = sugar modification: lna
cttgtacttcatccc

SEQ ID NO: 1380 - RNA, 15 nt, synthetic construct
  source 1..15: mol_type = other RNA; note = Antisense oligonucleotide
  modified_base 1: mod_base = m5c; mod_base = OTHER; note = sugar modification: lna; note = backbone modification: 5'-phosphorothioate
  modified_base 2: mod_base = OTHER; note = thymine; note = backbone modification: 5'-phosphorothioate; note = sugar modification: 2'-O-methoxyethylribose
  modified_base 3: mod_base = OTHER; note = sugar modification: 2-fluororibose; note = thymine; note = backbone modification: 5'-phosphorothioate
  modified_base 4: mod_base = OTHER; note = sugar modification: 2-fluororibose; note = backbone modification: 5'-phosphorothioate
  modified_base 5: mod_base = OTHER; note = thymine; note = sugar modification: 2-fluororibose; note = backbone modification: 5'-phosphorothioate
  modified_base 6: mod_base = OTHER; note = backbone modification: 5'-phosphorothioate; note = sugar modification: 2-fluororibose
  modified_base 7: mod_base = m5c; mod_base = OTHER; note = backbone modification: 5'-phosphorothioate; note = sugar modification: 2-fluororibose
  modified_base 8: mod_base = OTHER; note = sugar modification: 2'-O-methoxyethylribose; note = thymine; note = backbone modification: 5'-phosphorothioate
  modified_base 9: mod_base = OTHER; note = thymine; note = backbone modification: 5'-phosphorothioate; note = sugar modification: 2-fluororibose
  modified_base 10: mod_base = OTHER; mod_base = m5c; note = backbone modification: 5'-phosphorothioate; note = sugar modification: 2-fluororibose
  modified_base 11: mod_base = OTHER; note = sugar modification: 2-fluororibose; note = backbone modification: 5'-phosphorothioate
  modified_base 12: mod_base = OTHER; note = backbone modification: 5'-phosphorothioate; note = thymine; note = sugar modification: 2-fluororibose
  modified_base 13: mod_base = m5c; mod_base = OTHER; note = sugar modification: 2-fluororibose; note = backbone modification: 5'-phosphorothioate
  modified_base 14: mod_base = OTHER; mod_base = m5c; note = sugar modification: 2'-O-methoxyethylribose; note = backbone modification: 5'-phosphorothioate
  modified_base 15: mod_base = OTHER; mod_base = m5c; note = sugar modification: lna
cttgtacttcatccc

SEQ ID NO: 1381 - RNA, 15 nt, synthetic construct
  source 1..15: mol_type = other RNA; note = Antisense oligonucleotide
  modified_base 1: mod_base = OTHER; mod_base = m5c; note = backbone modification: 5'-phosphorothioate; note = sugar modification: lna
  modified_base 2: mod_base = OTHER; note = thymine; note = backbone modification: 5'-phosphorothioate; note = sugar modification: 2'-O-methoxyethylribose
  modified_base 3: mod_base = OTHER; note = sugar modification: 2-fluororibose; note = backbone modification: 5'-phosphorothioate; note = thymine
  modified_base 4: mod_base = OTHER; note = sugar modification: 2-fluororibose; note = backbone modification: 5'-phosphorothioate
  modified_base 5: mod_base = OTHER; note = sugar modification: 2-fluororibose; note = thymine; note = backbone modification: 5'-phosphorothioate
  modified_base 6: mod_base = OTHER; note = sugar modification: 2-fluororibose; note = backbone modification: 5'-phosphorothioate
  modified_base 7: mod_base = m5c; mod_base = OTHER; note = backbone modification: 5'-phosphorothioate; note = sugar modification: 2'-O-methoxyethylribose
  modified_base 8: mod_base = OTHER; note = backbone modification: 5'-phosphorothioate; note = thymine; note = sugar modification: 2'-O-methoxyethylribose
  modified_base 9: mod_base = OTHER; note = thymine; note = backbone modification: 5'-phosphorothioate; note = sugar modification: 2'-O-methoxyethylribose
  modified_base 10: mod_base = m5c; mod_base = OTHER; note = backbone modification: 5'-phosphorothioate; note = sugar modification: 2-fluororibose
  modified_base 11: mod_base = OTHER; note = backbone modification: 5'-phosphorothioate; note = sugar modification: 2-fluororibose
  modified_base 12: mod_base = OTHER; note = backbone modification: 5'-phosphorothioate; note = sugar modification: 2-fluororibose; note = thymine
  modified_base 13: mod_base = OTHER; mod_base = m5c; note = sugar modification: 2-fluororibose; note = backbone modification: 5'-phosphorothioate
  modified_base 14: mod_base = OTHER; mod_base = m5c; note = backbone modification: 5'-phosphorothioate; note = sugar modification: 2'-O-methoxyethylribose
  modified_base 15: mod_base = OTHER; mod_base = m5c; note = sugar modification: 2'-O-methoxyethylribose
cttgtacttcatccc

SEQ ID NO: 1382 - RNA, 15 nt, synthetic construct
  source 1..15: mol_type = other RNA; note = Antisense oligonucleotide
  modified_base 1: mod_base = OTHER; mod_base = m5c; note = sugar modification: lna; note = backbone modification: 5'-phosphorothioate
  modified_base 2: mod_base = OTHER; note = thymine; note = sugar modification: 2'-O-methoxyethylribose; note = backbone modification: 5'-phosphorothioate
  modified_base 3: mod_base = OTHER; note = thymine; note = sugar modification: 2'-O-methoxyethylribose; note = backbone modification: 5'-phosphorothioate
  modified_base 4: mod_base = OTHER; note = sugar modification: 2-fluororibose; note = backbone modification: 5'-phosphorothioate
  modified_base 5: mod_base = OTHER; note = sugar modification: 2-fluororibose; note = thymine; note = backbone modification: 5'-phosphorothioate
  modified_base 6: mod_base = OTHER; note = sugar modification: 2-fluororibose; note = backbone modification: 5'-phosphorothioate
  modified_base 7: mod_base = m5c; mod_base = OTHER; note = backbone modification: 5'-phosphorothioate; note = sugar modification: 2-fluororibose
  modified_base 8: mod_base = OTHER; note = backbone modification: 5'-phosphorothioate; note = thymine; note = sugar modification: 2'-O-methoxyethylribose
  modified_base 9: mod_base = OTHER; note = backbone modification: 5'-phosphorothioate; note = sugar modification: 2-fluororibose; note = thymine
  modified_base 10: mod_base = OTHER; mod_base = m5c; note = sugar modification: 2-fluororibose; note = backbone modification: 5'-phosphorothioate
  modified_base 11: mod_base = OTHER; note = sugar modification: 2-fluororibose; note = backbone modification: 5'-phosphorothioate
  modified_base 12: mod_base = OTHER; note = thymine; note = sugar modification: 2-fluororibose; note = backbone modification: 5'-phosphorothioate
  modified_base 13: mod_base = OTHER; mod_base = m5c; note = sugar modification: 2'-O-methoxyethylribose; note = backbone modification: 5'-phosphorothioate
  modified_base 14: mod_base = m5c; mod_base = OTHER; note = backbone modification: 5'-phosphorothioate; note = sugar modification: 2'-O-methoxyethylribose
  modified_base 15: mod_base = OTHER; mod_base = m5c; note = sugar modification: lna
cttgtacttcatccc

SEQ ID NO: 1383 - RNA, 15 nt, synthetic construct
  source 1..15: mol_type = other RNA; note = Antisense oligonucleotide
  modified_base 1: mod_base = OTHER; mod_base = m5c; note = sugar modification: lna; note = backbone modification: 5'-phosphorothioate
  modified_base 2: mod_base = OTHER; note = thymine; note = backbone modification: 5'-phosphorothioate; note = sugar modification: 2-fluororibose
  modified_base 3: mod_base = OTHER; note = backbone modification: 5'-phosphorothioate; note = thymine; note = sugar modification: 2-fluororibose
  modified_base 4: mod_base = OTHER; note = sugar modification: 2-fluororibose; note = backbone modification: 5'-phosphorothioate
  modified_base 5: mod_base = OTHER; note = thymine; note = sugar modification: 2-fluororibose; note = backbone modification: 5'-phosphorothioate
  modified_base 6: mod_base = OTHER; note = sugar modification: 2'-O-methoxyethylribose; note = backbone modification: 5'-phosphorothioate
  modified_base 7: mod_base = m5c; mod_base = OTHER; note = sugar modification: 2'-O-methoxyethylribose; note = backbone modification: 5'-phosphorothioate
  modified_base 8: mod_base = OTHER; note = thymine; note = sugar modification: 2'-O-methoxyethylribose; note = backbone modification: 5'-phosphorothioate
  modified_base 9: mod_base = OTHER; note = backbone modification: 5'-phosphorothioate; note = thymine; note = sugar modification: 2'-O-methoxyethylribose
  modified_base 10: mod_base = m5c; mod_base = OTHER; note = backbone modification: 5'-phosphorothioate; note = sugar modification: 2'-O-methoxyethylribose
  modified_base 11: mod_base = OTHER; note = sugar modification: 2-fluororibose; note = backbone modification: 5'-phosphorothioate
  modified_base 12: mod_base = OTHER; note = sugar modification: 2-fluororibose; note = thymine; note = backbone modification: 5'-phosphorothioate
  modified_base 13: mod_base = m5c; mod_base = OTHER; note = sugar modification: 2-fluororibose; note = backbone modification: 5'-phosphorothioate
  modified_base 14: mod_base = m5c; mod_base = OTHER; note = sugar modification: 2-fluororibose; note = backbone modification: 5'-phosphorothioate
  modified_base 15: mod_base = OTHER; mod_base = m5c; note = sugar modification: lna
cttgtacttcatccc

SEQ ID NO: 1384 - RNA, 15 nt, synthetic construct
  source 1..15: mol_type = other RNA; note = Antisense oligonucleotide
  modified_base 1: mod_base = OTHER; note = backbone modification: 5'-phosphorothioate; note = sugar modification: lna; note = thymine
  modified_base 2: mod_base = m5c; mod_base = OTHER; note = backbone modification: 5'-phosphorothioate; note = sugar modification: 2-fluororibose
  modified_base 3: mod_base = OTHER; note = sugar modification: 2-fluororibose; note = backbone modification: 5'-phosphorothioate; note = thymine
  modified_base 4: mod_base = OTHER; note = sugar modification: 2-fluororibose; note = thymine; note = backbone modification: 5'-phosphorothioate
  modified_base 5: mod_base = OTHER; note = backbone modification: 5'-phosphorothioate; note = sugar modification: 2-fluororibose
  modified_base 6: mod_base = OTHER; note = sugar modification: 2-fluororibose; note = thymine; note = backbone modification: 5'-phosphorothioate
  modified_base 7: mod_base = OTHER; note = sugar modification: 2-fluororibose; note = backbone modification: 5'-phosphorothioate
  modified_base 8: mod_base = OTHER; mod_base = m5c; note = backbone modification: 5'-phosphorothioate; note = sugar modification: 2-fluororibose
  modified_base 9: mod_base = OTHER; note = backbone modification: 5'-phosphorothioate; note = thymine; note = sugar modification: 2-fluororibose
  modified_base 10: mod_base = OTHER; note = sugar modification: 2-fluororibose; note = backbone modification: 5'-phosphorothioate; note = thymine
  modified_base 11: mod_base = OTHER; mod_base = m5c; note = sugar modification: 2-fluororibose; note = backbone modification: 5'-phosphorothioate
  modified_base 12: mod_base = OTHER; note = sugar modification: 2-fluororibose; note = backbone modification: 5'-phosphorothioate
  modified_base 13: mod_base = OTHER; note = thymine; note = sugar modification: 2-fluororibose; note = backbone modification: 5'-phosphorothioate
  modified_base 14: mod_base = OTHER; mod_base = m5c; note = sugar modification: 2-fluororibose; note = backbone modification: 5'-phosphorothioate
  modified_base 15: mod_base = OTHER; mod_base = m5c; note = sugar modification: lna
tcttgtacttcatcc

SEQ ID NO: 1385 - RNA, 15 nt, synthetic construct
  source 1..15: mol_type = other RNA; note = Antisense oligonucleotide
  modified_base 1: mod_base = OTHER; note = sugar modification: lna; note = backbone modification: 5'-phosphorothioate; note = thymine
  modified_base 2: mod_base = m5c; mod_base = OTHER; note = backbone modification: 5'-phosphorothioate; note = sugar modification: 2'-O-methoxyethylribose
  modified_base 3: mod_base = OTHER; note = sugar modification: 2-fluororibose; note = backbone modification: 5'-phosphorothioate; note = thymine
  modified_base 4: mod_base = OTHER; note = backbone modification: 5'-phosphorothioate; note = sugar modification: 2-fluororibose; note = thymine
  modified_base 5: mod_base = OTHER; note = sugar modification: 2-fluororibose; note = backbone modification: 5'-phosphorothioate
  modified_base 6: mod_base = OTHER; note = thymine; note = backbone modification: 5'-phosphorothioate; note = sugar modification: 2-fluororibose
  modified_base 7: mod_base = OTHER; note = sugar modification: 2-fluororibose; note = backbone modification: 5'-phosphorothioate
  modified_base 8: mod_base = OTHER; mod_base = m5c; note = backbone modification: 5'-phosphorothioate; note = sugar modification: 2-fluororibose
  modified_base 9: mod_base = OTHER; note = backbone modification: 5'-phosphorothioate; note = sugar modification: 2-fluororibose; note = thymine
  modified_base 10: mod_base = OTHER; note = backbone modification: 5'-phosphorothioate; note = thymine; note = sugar modification: 2-fluororibose
  modified_base 11: mod_base = m5c; mod_base = OTHER; note = sugar modification: 2-fluororibose; note = backbone modification: 5'-phosphorothioate
  modified_base 12: mod_base = OTHER; note = sugar modification: 2-fluororibose; note = backbone modification: 5'-phosphorothioate
  modified_base 13: mod_base = OTHER; note = sugar modification: 2-fluororibose; note = thymine; note = backbone modification: 5'-phosphorothioate
  modified_base 14: mod_base = OTHER; mod_base = m5c; note = sugar modification: 2'-O-methoxyethylribose; note = backbone modification: 5'-phosphorothioate
  modified_base 15: mod_base = OTHER; mod_base = m5c; note = sugar modification: lna
tcttgtacttcatcc

SEQ ID NO: 1386 - RNA, 15 nt, synthetic construct
  source 1..15: mol_type = other RNA; note = Antisense oligonucleotide
  modified_base 1: mod_base = OTHER; note = sugar modification: lna; note = backbone modification: 5'-phosphorothioate; note = thymine
  modified_base 2: mod_base = OTHER; mod_base = m5c; note = backbone modification: 5'-phosphorothioate; note = sugar modification: 2'-O-methoxyethylribose
  modified_base 3: mod_base = OTHER; note = sugar modification: 2'-O-methoxyethylribose; note = thymine; note = backbone modification: 5'-phosphorothioate
  modified_base 4: mod_base = OTHER; note = sugar modification: 2-fluororibose; note = backbone modification: 5'-phosphorothioate; note = thymine
  modified_base 5: mod_base = OTHER; note = backbone modification: 5'-phosphorothioate; note = sugar modification: 2-fluororibose
  modified_base 6: mod_base = OTHER; note = sugar modification: 2-fluororibose; note = backbone modification: 5'-phosphorothioate; note = thymine
  modified_base 7: mod_base = OTHER; note = backbone modification: 5'-phosphorothioate; note = sugar modification: 2-fluororibose
  modified_base 8: mod_base = m5c; mod_base = OTHER; note = backbone modification: 5'-phosphorothioate; note = sugar modification: 2-fluororibose
  modified_base 9: mod_base = OTHER; note = sugar modification: 2-fluororibose; note = backbone modification: 5'-phosphorothioate; note = thymine
  modified_base 10: mod_base = OTHER; note = sugar modification: 2-fluororibose; note = thymine; note = backbone modification: 5'-phosphorothioate
  modified_base 11: mod_base = OTHER; mod_base = m5c; note = backbone modification: 5'-phosphorothioate; note = sugar modification: 2-fluororibose
  modified_base 12: mod_base = OTHER; note = sugar modification: 2-fluororibose; note = backbone modification: 5'-phosphorothioate
  modified_base 13: mod_base = OTHER; note = sugar modification: 2'-O-methoxyethylribose; note = thymine; note = backbone modification: 5'-phosphorothioate
  modified_base 14: mod_base = m5c; mod_base = OTHER; note = backbone modification: 5'-phosphorothioate; note = sugar modification: 2'-O-methoxyethylribose
  modified_base 15: mod_base = OTHER; mod_base = m5c; note = sugar modification: lna
tcttgtacttcatcc

SEQ ID NO: 1387 - RNA, 15 nt, synthetic construct
  source 1..15: mol_type = other RNA; note = Antisense oligonucleotide
  modified_base 1: mod_base = OTHER; note = backbone modification: 5'-phosphorothioate; note = sugar modification: lna; note = thymine
  modified_base 2: mod_base = m5c; mod_base = OTHER; note = backbone modification: 5'-phosphorothioate; note = sugar modification: 2'-O-methoxyethylribose
  modified_base 3: mod_base = OTHER; note = backbone modification: 5'-phosphorothioate; note = sugar modification: 2'-O-methoxyethylribose; note = thymine
  modified_base 4: mod_base = OTHER; note = thymine; note = backbone modification: 5'-phosphorothioate; note = sugar modification: 2'-O-methoxyethylribose
  modified_base 5: mod_base = OTHER; note = backbone modification: 5'-phosphorothioate; note = sugar modification: 2-fluororibose
  modified_base 6: mod_base = OTHER; note = thymine; note = backbone modification: 5'-phosphorothioate; note = sugar modification: 2-fluororibose
  modified_base 7: mod_base = OTHER; note = backbone modification: 5'-phosphorothioate; note = sugar modification: 2-fluororibose
  modified_base 8: mod_base = m5c; mod_base = OTHER; note = backbone modification: 5'-phosphorothioate; note = sugar modification: 2-fluororibose
  modified_base 9: mod_base = OTHER; note = backbone modification: 5'-phosphorothioate; note = sugar modification: 2-fluororibose; note = thymine
  modified_base 10: mod_base = OTHER; note = sugar modification: 2-fluororibose; note = thymine; note = backbone modification: 5'-phosphorothioate
  modified_base 11: mod_base = m5c; mod_base = OTHER; note = backbone modification: 5'-phosphorothioate; note = sugar modification: 2-fluororibose
  modified_base 12: mod_base = OTHER; note = sugar modification: 2'-O-methoxyethylribose; note = backbone modification: 5'-phosphorothioate
  modified_base 13: mod_base = OTHER; note = backbone modification: 5'-phosphorothioate; note = thymine; note = sugar modification: 2'-O-methoxyethylribose
  modified_base 14: mod_base = m5c; mod_base = OTHER; note = backbone modification: 5'-phosphorothioate; note = sugar modification: 2'-O-methoxyethylribose
  modified_base 15: mod_base = m5c; mod_base = OTHER; note = sugar modification: lna
tcttgtacttcatcc

SEQ ID NO: 1388 - RNA, 15 nt, synthetic construct
  source 1..15: mol_type = other RNA; note = Antisense oligonucleotide
  modified_base 1: mod_base = OTHER; note = thymine; note = backbone modification: 5'-phosphorothioate; note = sugar modification: lna
  modified_base 2: mod_base = OTHER; mod_base = m5c; note = backbone modification: 5'-phosphorothioate; note = sugar modification: 2'-O-methoxyethylribose
  modified_base 3: mod_base = OTHER; note = thymine; note = backbone modification: 5'-phosphorothioate; note = sugar modification: 2'-O-methoxyethylribose
  modified_base 4: mod_base = OTHER; note = backbone modification: 5'-phosphorothioate; note = thymine; note = sugar modification: 2'-O-methoxyethylribose
  modified_base 5: mod_base = OTHER; note = sugar modification: 2'-O-methoxyethylribose; note = backbone modification: 5'-phosphorothioate
  modified_base 6: mod_base = OTHER; note = thymine; note = backbone modification: 5'-phosphorothioate; note = sugar modification: 2-fluororibose
  modified_base 7: mod_base = OTHER; note = sugar modification: 2-fluororibose; note = backbone modification: 5'-phosphorothioate
  modified_base 8: mod_base = OTHER; mod_base = m5c; note = sugar modification: 2-fluororibose; note = backbone modification: 5'-phosphorothioate
  modified_base 9: mod_base = OTHER; note = thymine; note = backbone modification: 5'-phosphorothioate; note = sugar modification: 2-fluororibose
  modified_base 10: mod_base = OTHER; note = backbone modification: 5'-phosphorothioate; note = sugar modification: 2-fluororibose; note = thymine
  modified_base 11: mod_base = OTHER; mod_base = m5c; note = backbone modification: 5'-phosphorothioate; note = sugar modification: 2'-O-methoxyethylribose
  modified_base 12: mod_base = OTHER; note = backbone modification: 5'-phosphorothioate; note = sugar modification: 2'-O-methoxyethylribose
  modified_base 13: mod_base = OTHER; note = thymine; note = sugar modification: 2'-O-methoxyethylribose; note = backbone modification: 5'-phosphorothioate
  modified_base 14: mod_base = m5c; mod_base = OTHER; note = sugar modification: 2'-O-methoxyethylribose; note = backbone modification: 5'-phosphorothioate
  modified_base 15: mod_base = OTHER; mod_base = m5c; note = sugar modification: lna
tcttgtacttcatcc

SEQ ID NO: 1389 - RNA, 15 nt, synthetic construct
  source 1..15: mol_type = other RNA; note = Antisense oligonucleotide
  modified_base 1: mod_base = OTHER; note = thymine; note = sugar modification: lna; note = backbone modification: 5'-phosphorothioate
  modified_base 2: mod_base = OTHER; mod_base = m5c; note = sugar modification: 2-fluororibose; note = backbone modification: 5'-phosphorothioate
  modified_base 3: mod_base = OTHER; note = sugar modification: 2-fluororibose; note = backbone modification: 5'-phosphorothioate; note = thymine
  modified_base 4: mod_base = OTHER; note = backbone modification: 5'-phosphorothioate; note = sugar modification: 2-fluororibose; note = thymine
  modified_base 5: mod_base = OTHER; note = sugar modification: 2-fluororibose; note = backbone modification: 5'-phosphorothioate
  modified_base 6: mod_base = OTHER; note = thymine; note = backbone modification: 5'-phosphorothioate; note = sugar modification: 2-fluororibose
  modified_base 7: mod_base = OTHER; note = backbone modification: 5'-phosphorothioate; note = sugar modification: 2'-O-methoxyethylribose
  modified_base 8: mod_base = m5c; mod_base = OTHER; note = sugar modification: 2'-O-methoxyethylribose; note = backbone modification: 5'-phosphorothioate
  modified_base 9: mod_base = OTHER; note = sugar modification: 2'-O-methoxyethylribose; note = backbone modification: 5'-phosphorothioate; note = thymine
  modified_base 10: mod_base = OTHER; note = backbone modification: 5'-phosphorothioate; note = thymine; note = sugar modification: 2-fluororibose
  modified_base 11: mod_base = m5c; mod_base = OTHER; note = backbone modification: 5'-phosphorothioate; note = sugar modification: 2-fluororibose
  modified_base 12: mod_base = OTHER; note = sugar modification: 2-fluororibose; note = backbone modification: 5'-phosphorothioate
  modified_base 13: mod_base = OTHER; note = thymine; note = backbone modification: 5'-phosphorothioate; note = sugar modification: 2-fluororibose
  modified_base 14: mod_base = OTHER; mod_base = m5c; note = backbone modification: 5'-phosphorothioate; note = sugar modification: 2-fluororibose
  modified_base 15: mod_base = m5c; mod_base = OTHER; note = sugar modification: lna
tcttgtacttcatcc

SEQ ID NO: 1390 - RNA, 15 nt, synthetic construct
  source 1..15: mol_type = other RNA; note = Antisense oligonucleotide
  modified_base 1: mod_base = OTHER; note = backbone modification: 5'-phosphorothioate; note = sugar modification: lna; note = thymine
  modified_base 2: mod_base = OTHER; mod_base = m5c; note = backbone modification: 5'-phosphorothioate; note = sugar modification: 2'-O-methoxyethylribose
  modified_base 3: mod_base = OTHER; note = thymine; note = sugar modification: 2-fluororibose; note = backbone modification: 5'-phosphorothioate
  modified_base 4: mod_base = OTHER; note = thymine; note = backbone modification: 5'-phosphorothioate; note = sugar modification: 2-fluororibose
  modified_base 5: mod_base = OTHER; note = sugar modification: 2-fluororibose; note = backbone modification: 5'-phosphorothioate
  modified_base 6: mod_base = OTHER; note = backbone modification: 5'-phosphorothioate; note = thymine; note = sugar modification: 2-fluororibose
  modified_base 7: mod_base = OTHER; note = sugar modification: 2-fluororibose; note = backbone modification: 5'-phosphorothioate
  modified_base 8: mod_base = OTHER; mod_base = m5c; note = sugar modification: 2'-O-methoxyethylribose; note = backbone modification: 5'-phosphorothioate
  modified_base 9: mod_base = OTHER; note = thymine; note = backbone modification: 5'-phosphorothioate; note = sugar modification: 2-fluororibose
  modified_base 10: mod_base = OTHER; note = sugar modification: 2-fluororibose; note = backbone modification: 5'-phosphorothioate; note = thymine
  modified_base 11: mod_base = m5c; mod_base = OTHER; note = sugar modification: 2-fluororibose; note = backbone modification: 5'-phosphorothioate
  modified_base 12: mod_base = OTHER; note = backbone modification: 5'-phosphorothioate; note = sugar modification: 2-fluororibose
  modified_base 13: mod_base = OTHER; note = thymine; note = sugar modification: 2-fluororibose; note = backbone modification: 5'-phosphorothioate
  modified_base 14: mod_base = m5c; mod_base = OTHER; note = sugar modification: 2'-O-methoxyethylribose; note = backbone modification: 5'-phosphorothioate
  modified_base 15: mod_base = m5c; mod_base = OTHER; note = sugar modification: lna
tcttgtacttcatcc

SEQ ID NO: 1391 - RNA, 15 nt, synthetic construct
  source 1..15: mol_type = other RNA; note = Antisense oligonucleotide
  modified_base 1: mod_base = OTHER; note = thymine; note = sugar modification: lna; note = backbone modification: 5'-phosphorothioate
  modified_base 2: mod_base = m5c; mod_base = OTHER; note = sugar modification: 2'-O-methoxyethylribose; note = backbone modification: 5'-phosphorothioate
  modified_base 3: mod_base = OTHER; note = sugar modification: 2-fluororibose; note = backbone modification: 5'-phosphorothioate; note = thymine
  modified_base 4: mod_base = OTHER; note = thymine; note = backbone modification: 5'-phosphorothioate; note = sugar modification: 2-fluororibose
  modified_base 5: mod_base = OTHER; note = backbone modification: 5'-phosphorothioate; note = sugar modification: 2-fluororibose
  modified_base 6: mod_base = OTHER; note = sugar modification: 2-fluororibose; note = thymine; note = backbone modification: 5'-phosphorothioate
  modified_base 7: mod_base = OTHER; note = backbone modification: 5'-phosphorothioate; note = sugar modification: 2'-O-methoxyethylribose
  modified_base 8: mod_base = m5c; mod_base = OTHER; note = backbone modification: 5'-phosphorothioate; note = sugar modification: 2'-O-methoxyethylribose
  modified_base 9: mod_base = OTHER; note = backbone modification: 5'-phosphorothioate; note = sugar modification: 2'-O-methoxyethylribose; note = thymine
  modified_base 10: mod_base = OTHER; note = backbone modification: 5'-phosphorothioate; note = sugar modification: 2-fluororibose; note = thymine
  modified_base 11: mod_base = m5c; mod_base = OTHER; note = sugar modification: 2-fluororibose; note = backbone modification: 5'-phosphorothioate
  modified_base 12: mod_base = OTHER; note = sugar modification: 2-fluororibose; note = backbone modification: 5'-phosphorothioate
  modified_base 13: mod_base = OTHER; note = sugar modification: 2-fluororibose; note = thymine; note = backbone modification: 5'-phosphorothioate
  modified_base 14: mod_base = OTHER; mod_base = m5c; note = sugar modification: 2'-O-methoxyethylribose; note = backbone modification: 5'-phosphorothioate
  modified_base 15: mod_base = OTHER; mod_base = m5c; note = sugar modification: lna
tcttgtacttcatcc

SEQ ID NO: 1392 - RNA, 15 nt, synthetic construct
  source 1..15: mol_type = other RNA; note = Antisense oligonucleotide
  modified_base 1: mod_base = OTHER; note = backbone modification: 5'-phosphorothioate; note = sugar modification: lna; note = thymine
  modified_base 2: mod_base = m5c; mod_base = OTHER; note = backbone modification: 5'-phosphorothioate; note = sugar modification: 2'-O-methoxyethylribose
  modified_base 3: mod_base = OTHER; note = thymine; note = sugar modification: 2'-O-methoxyethylribose; note = backbone modification: 5'-phosphorothioate
  modified_base 4: mod_base = OTHER; note = backbone modification: 5'-phosphorothioate; note = thymine; note = sugar modification: 2-fluororibose
  modified_base 5: mod_base = OTHER; note = sugar modification: 2-fluororibose; note = backbone modification: 5'-phosphorothioate
  modified_base 6: mod_base = OTHER; note = sugar modification: 2-fluororibose; note = backbone modification: 5'-phosphorothioate; note = thymine
  modified_base 7: mod_base = OTHER; note = backbone modification: 5'-phosphorothioate; note = sugar modification: 2-fluororibose
  modified_base 8: mod_base = OTHER; mod_base = m5c; note = sugar modification: 2'-O-methoxyethylribose; note = backbone modification: 5'-phosphorothioate
  modified_base 9: mod_base = OTHER; note = backbone modification: 5'-phosphorothioate; note = thymine; note = sugar modification: 2-fluororibose
  modified_base 10: mod_base = OTHER; note = thymine; note = sugar modification: 2-fluororibose; note = backbone modification: 5'-phosphorothioate
  modified_base 11: mod_base = m5c; mod_base = OTHER; note = backbone modification: 5'-phosphorothioate; note = sugar modification: 2-fluororibose
  modified_base 12: mod_base = OTHER; note = backbone modification: 5'-phosphorothioate; note = sugar modification: 2-fluororibose
  modified_base 13: mod_base = OTHER; note = sugar modification: 2'-O-methoxyethylribose; note = backbone modification: 5'-phosphorothioate; note = thymine
  modified_base 14: mod_base = m5c; mod_base = OTHER; note = sugar modification: 2'-O-methoxyethylribose; note = backbone modification: 5'-phosphorothioate
  modified_base 15: mod_base = OTHER; mod_base = m5c; note = sugar modification: lna
tcttgtacttcatcc

SEQ ID NO: 1393 - RNA, 15 nt, synthetic construct
  source 1..15: mol_type = other RNA; note = Antisense oligonucleotide
  modified_base 1: mod_base = OTHER; note = thymine; note = backbone modification: 5'-phosphorothioate; note = sugar modification: lna
  modified_base 2: mod_base = m5c; mod_base = OTHER; note = sugar modification: 2-fluororibose; note = backbone modification: 5'-phosphorothioate
  modified_base 3: mod_base = OTHER; note = thymine; note = backbone modification: 5'-phosphorothioate; note = sugar modification: 2-fluororibose
  modified_base 4: mod_base = OTHER; note = backbone modification: 5'-phosphorothioate; note = sugar modification: 2-fluororibose; note = thymine
  modified_base 5: mod_base = OTHER; note = sugar modification: 2-fluororibose; note = backbone modification: 5'-phosphorothioate
  modified_base 6: mod_base = OTHER; note = thymine; note = backbone modification: 5'-phosphorothioate; note = sugar modification: 2'-O-methoxyethylribose
  modified_base 7: mod_base = OTHER; note = backbone modification: 5'-phosphorothioate; note = sugar modification: 2'-O-methoxyethylribose
  modified_base 8: mod_base = m5c; mod_base = OTHER; note = sugar modification: 2'-O-methoxyethylribose; note = backbone modification: 5'-phosphorothioate
  modified_base 9: mod_base = OTHER; note = sugar modification: 2'-O-methoxyethylribose; note = backbone modification: 5'-phosphorothioate; note = thymine
  modified_base 10: mod_base = OTHER; note = backbone modification: 5'-phosphorothioate; note = thymine; note = sugar modification: 2'-O-methoxyethylribose
  modified_base 11: mod_base = OTHER; mod_base = m5c; note = sugar modification: 2-fluororibose; note = backbone modification: 5'-phosphorothioate
  modified_base 12: mod_base = OTHER; note = backbone modification: 5'-phosphorothioate; note = sugar modification: 2-fluororibose
  modified_base 13: mod_base = OTHER; note = backbone modification: 5'-phosphorothioate; note = thymine; note = sugar modification: 2-fluororibose
  modified_base 14: mod_base = OTHER; mod_base = m5c; note = backbone modification: 5'-phosphorothioate; note = sugar modification: 2-fluororibose
  modified_base 15: mod_base = OTHER; mod_base = m5c; note = sugar modification: lna
tcttgtacttcatcc

SEQ ID NO: 1394 - RNA, 16 nt, synthetic construct
  source 1..16: mol_type = other RNA; note = Antisense oligonucleotide
  modified_base 1: mod_base = OTHER; note = sugar modification: lna; note = backbone modification: 5'-phosphorothioate
  modified_base 2: mod_base = OTHER; note = thymine; note = backbone modification: 5'-phosphorothioate; note = sugar modification: 2-fluororibose
  modified_base 3: mod_base = OTHER; note = sugar modification: 2-fluororibose; note = thymine; note = backbone modification: 5'-phosphorothioate
  modified_base 4: mod_base = m5c; mod_base = OTHER; note = backbone modification: 5'-phosphorothioate; note = sugar modification: 2-fluororibose
  modified_base 5: mod_base = OTHER; note = sugar modification: 2-fluororibose; note = thymine; note = backbone modification: 5'-phosphorothioate
  modified_base 6: mod_base = OTHER; note = sugar modification: 2-fluororibose; note = thymine; note = backbone modification: 5'-phosphorothioate
  modified_base 7: mod_base = OTHER; note = sugar modification: 2-fluororibose; note = backbone modification: 5'-phosphorothioate
  modified_base 8: mod_base = OTHER; note = thymine; note = sugar modification: 2-fluororibose; note = backbone modification: 5'-phosphorothioate
  modified_base 9: mod_base = OTHER; note = backbone modification: 5'-phosphorothioate; note = sugar modification: 2-fluororibose
  modified_base 10: mod_base = OTHER; mod_base = m5c; note = backbone modification: 5'-phosphorothioate; note = sugar modification: 2-fluororibose
  modified_base 11: mod_base = OTHER; note = thymine; note = sugar modification: 2-fluororibose; note = backbone modification: 5'-phosphorothioate
  modified_base 12: mod_base = OTHER; note = sugar modification: 2-fluororibose; note = backbone modification: 5'-phosphorothioate; note = thymine
  modified_base 13: mod_base = m5c; mod_base = OTHER; note = sugar modification: 2-fluororibose; note = backbone modification: 5'-phosphorothioate
  modified_base 14: mod_base = OTHER; note = backbone modification: 5'-phosphorothioate; note = sugar modification: 2-fluororibose
  modified_base 15: mod_base = OTHER; note = backbone modification: 5'-phosphorothioate; note = sugar modification: 2-fluororibose; note = thymine
  modified_base 16: mod_base = m5c; mod_base = OTHER; note = sugar modification: lna
gttcttgtacttcatc

SEQ ID NO: 1395 - RNA, 16 nt, synthetic construct
  source 1..16: mol_type = other RNA; note = Antisense oligonucleotide
  modified_base 1: mod_base = OTHER; note = sugar modification: lna; note = backbone modification: 5'-phosphorothioate
  modified_base 2: mod_base = OTHER; note = backbone modification: 5'-phosphorothioate; note = sugar modification: 2'-O-methoxyethylribose; note = thymine
  modified_base 3: mod_base = OTHER; note = backbone modification: 5'-phosphorothioate; note = sugar modification: 2-fluororibose; note = thymine
  modified_base 4: mod_base = OTHER; mod_base = m5c; note = backbone modification: 5'-phosphorothioate; note = sugar modification: 2-fluororibose
  modified_base 5: mod_base = OTHER; note = sugar modification: 2-fluororibose; note = thymine; note = backbone modification: 5'-phosphorothioate
  modified_base 6: mod_base = OTHER; note = backbone modification: 5'-phosphorothioate; note = sugar modification: 2-fluororibose; note = thymine
  modified_base 7: mod_base = OTHER; note = backbone modification: 5'-phosphorothioate; note = sugar modification: 2-fluororibose
  modified_base 8: mod_base = OTHER; note = thymine; note = backbone modification: 5'-phosphorothioate; note = sugar modification: 2-fluororibose
  modified_base 9: mod_base = OTHER; note = backbone modification: 5'-phosphorothioate; note = sugar modification: 2-fluororibose
  modified_base 10: mod_base = m5c; mod_base = OTHER; note = sugar modification: 2-fluororibose; note = backbone modification: 5'-phosphorothioate
  modified_base 11: mod_base = OTHER; note = sugar modification: 2-fluororibose; note = thymine; note = backbone modification: 5'-phosphorothioate
  modified_base 12: mod_base = OTHER; note = sugar modification: 2-fluororibose; note = backbone modification: 5'-phosphorothioate; note = thymine
  modified_base 13: mod_base = OTHER; mod_base = m5c; note = backbone modification: 5'-phosphorothioate; note = sugar modification: 2-fluororibose
  modified_base 14: mod_base = OTHER; note = sugar modification: 2-fluororibose; note = backbone modification: 5'-phosphorothioate
  modified_base 15: mod_base = OTHER; note = sugar modification: 2'-O-methoxyethylribose; note = thymine; note = backbone modification: 5'-phosphorothioate
  modified_base 16: mod_base = OTHER; mod_base = m5c; note = sugar modification: lna
gttcttgtacttcatc

SEQ ID NO: 1396 - RNA, 16 nt, synthetic construct
  source 1..16: mol_type = other RNA; note = Antisense oligonucleotide
  modified_base 1: mod_base = OTHER; note = backbone modification: 5'-phosphorothioate; note = sugar modification: lna
  modified_base 2: mod_base = OTHER; note = thymine; note = backbone modification: 5'-phosphorothioate; note = sugar modification: 2'-O-methoxyethylribose
  modified_base 3: mod_base = OTHER; note = backbone modification: 5'-phosphorothioate; note = sugar modification: 2'-O-methoxyethylribose; note = thymine
  modified_base 4: mod_base = OTHER; mod_base = m5c; note = backbone modification: 5'-phosphorothioate; note = sugar modification: 2-fluororibose
  modified_base 5: mod_base = OTHER; note = thymine; note = sugar modification: 2-fluororibose; note = backbone modification: 5'-phosphorothioate
  modified_base 6: mod_base = OTHER; note = thymine; note = backbone modification: 5'-phosphorothioate; note = sugar modification: 2-fluororibose
  modified_base 7: mod_base = OTHER; note = backbone modification: 5'-phosphorothioate; note = sugar modification: 2-fluororibose
  modified_base 8: mod_base = OTHER; note = sugar modification: 2-fluororibose; note = backbone modification: 5'-phosphorothioate; note = thymine
  modified_base 9: mod_base = OTHER; note = backbone modification: 5'-phosphorothioate; note = sugar modification: 2-fluororibose
  modified_base 10: mod_base = m5c; mod_base = OTHER; note = backbone modification: 5'-phosphorothioate; note = sugar modification: 2-fluororibose
  modified_base 11: mod_base = OTHER; note = thymine; note = backbone modification: 5'-phosphorothioate; note = sugar modification: 2-fluororibose
  modified_base 12: mod_base = OTHER; note = thymine; note = sugar modification: 2-fluororibose; note = backbone modification: 5'-phosphorothioate
  modified_base 13: mod_base = m5c; mod_base = OTHER; note = backbone modification: 5'-phosphorothioate; note = sugar modification: 2-fluororibose
  modified_base 14: mod_base = OTHER; note = backbone modification: 5'-phosphorothioate; note = sugar modification: 2'-O-methoxyethylribose
  modified_base 15: mod_base = OTHER; note = backbone modification: 5'-phosphorothioate; note = thymine; note = sugar modification: 2'-O-methoxyethylribose
  modified_base 16: mod_base = OTHER; mod_base = m5c; note = sugar modification: lna
gttcttgtacttcatc

SEQ ID NO: 1397 - RNA, 16 nt, synthetic construct
  source 1..16: mol_type = other RNA; note = Antisense oligonucleotide
  modified_base 1: mod_base = OTHER; note = sugar modification: lna; note = backbone modification: 5'-phosphorothioate
  modified_base 2: mod_base = OTHER; note = thymine; note = backbone modification: 5'-phosphorothioate; note = sugar modification: 2'-O-methoxyethylribose
  modified_base 3: mod_base = OTHER; note = thymine; note = sugar modification: 2'-O-methoxyethylribose; note = backbone modification: 5'-phosphorothioate
  modified_base 4: mod_base = m5c; mod_base = OTHER; note = backbone modification: 5'-phosphorothioate; note = sugar modification: 2'-O-methoxyethylribose
  modified_base 5: mod_base = OTHER; note = thymine; note = backbone modification: 5'-phosphorothioate; note = sugar modification: 2-fluororibose
  modified_base 6: mod_base = OTHER; note = backbone modification: 5'-phosphorothioate; note = thymine; note = sugar modification: 2-fluororibose
  modified_base 7: mod_base = OTHER; note = backbone modification: 5'-phosphorothioate; note = sugar modification: 2-fluororibose
  modified_base 8: mod_base = OTHER; note = thymine; note = sugar modification: 2-fluororibose; note = backbone modification: 5'-phosphorothioate
  modified_base 9: mod_base = OTHER; note = backbone modification: 5'-phosphorothioate; note = sugar modification: 2-fluororibose
  modified_base 10: mod_base = OTHER; mod_base = m5c; note = sugar modification: 2-fluororibose; note = backbone modification: 5'-phosphorothioate
  modified_base 11: mod_base = OTHER; note = sugar modification: 2-fluororibose; note = backbone modification: 5'-phosphorothioate; note = thymine
  modified_base 12: mod_base = OTHER; note = backbone modification: 5'-phosphorothioate; note = thymine; note = sugar modification: 2-fluororibose
  modified_base 13: mod_base = OTHER; mod_base = m5c; note = backbone modification: 5'-phosphorothioate; note = sugar modification: 2'-O-methoxyethylribose
  modified_base 14: mod_base = OTHER; note = backbone modification: 5'-phosphorothioate; note = sugar modification: 2'-O-methoxyethylribose
  modified_base 15: mod_base = OTHER; note = sugar modification: 2'-O-methoxyethylribose; note = backbone modification: 5'-phosphorothioate; note = thymine
  modified_base 16: mod_base = m5c; mod_base = OTHER; note = sugar modification: lna
gttcttgtacttcatc

SEQ ID NO: 1398 - RNA, 16 nt, synthetic construct
  source 1..16: mol_type = other RNA; note = Antisense oligonucleotide
  modified_base 1: mod_base = OTHER; note = backbone modification: 5'-phosphorothioate; note = sugar modification: lna
  modified_base 2: mod_base = OTHER; note = backbone modification: 5'-phosphorothioate; note = thymine; note = sugar modification: 2'-O-methoxyethylribose
  modified_base 3: mod_base = OTHER; note = thymine; note = sugar modification: 2'-O-methoxyethylribose; note = backbone modification: 5'-phosphorothioate
  modified_base 4: mod_base = m5c; mod_base = OTHER; note = backbone modification: 5'-phosphorothioate; note = sugar modification: 2'-O-methoxyethylribose
  modified_base 5: mod_base = OTHER; note = backbone modification: 5'-phosphorothioate; note = sugar modification: 2'-O-methoxyethylribose; note = thymine
  modified_base 6: mod_base = OTHER; note = thymine; note = sugar modification: 2-fluororibose; note = backbone modification: 5'-phosphorothioate
  modified_base 7: mod_base = OTHER; note = backbone modification: 5'-phosphorothioate; note = sugar modification: 2-fluororibose
  modified_base 8: mod_base = OTHER; note = thymine; note = sugar modification: 2-fluororibose; note = backbone modification: 5'-phosphorothioate
  modified_base 9: mod_base = OTHER; note = sugar modification: 2-fluororibose; note = backbone modification: 5'-phosphorothioate
  modified_base 10: mod_base = m5c; mod_base = OTHER; note = sugar modification: 2-fluororibose; note = backbone modification: 5'-phosphorothioate
  modified_base 11: mod_base = OTHER; note = thymine; note = backbone modification: 5'-phosphorothioate; note = sugar modification: 2-fluororibose
  modified_base 12: mod_base = OTHER; note = sugar modification: 2'-O-methoxyethylribose; note = backbone modification: 5'-phosphorothioate; note = thymine
  modified_base 13: mod_base = m5c; mod_base = OTHER; note = sugar modification: 2'-O-methoxyethylribose; note = backbone modification: 5'-phosphorothioate
  modified_base 14: mod_base = OTHER; note = backbone modification: 5'-phosphorothioate; note = sugar modification: 2'-O-methoxyethylribose
  modified_base 15: mod_base = OTHER; note = thymine; note = sugar modification: 2'-O-methoxyethylribose; note = backbone modification: 5'-phosphorothioate
  modified_base 16: mod_base = m5c; mod_base = OTHER; note = sugar modification: lna
gttcttgtacttcatc

SEQ ID NO: 1399 - RNA, 16 nt, synthetic construct
  source 1..16: mol_type = other RNA; note = Antisense oligonucleotide
  modified_base 1: mod_base = OTHER; note = sugar modification: lna; note = backbone modification: 5'-phosphorothioate
  modified_base 2: mod_base = OTHER; note = backbone modification: 5'-phosphorothioate; note = sugar modification: 2'-O-methoxyethylribose; note = thymine
  modified_base 3: mod_base = OTHER; note = sugar modification: 2'-O-methoxyethylribose; note = thymine; note = backbone modification: 5'-phosphorothioate
  modified_base 4: mod_base = m5c; mod_base = OTHER; note = sugar modification: 2'-O-methoxyethylribose; note = backbone modification: 5'-phosphorothioate
  modified_base 5: mod_base = OTHER; note = thymine; note = backbone modification: 5'-phosphorothioate; note = sugar modification: 2'-O-methoxyethylribose
  modified_base 6: mod_base = OTHER; note = thymine; note = backbone modification: 5'-phosphorothioate; note = sugar modification: 2'-O-methoxyethylribose
  modified_base 7: mod_base = OTHER; note = backbone modification: 5'-phosphorothioate; note = sugar modification: 2-fluororibose
  modified_base 8: mod_base = OTHER; note = backbone modification: 5'-phosphorothioate; note = sugar modification: 2-fluororibose; note = thymine
  modified_base 9: mod_base = OTHER; note = backbone modification: 5'-phosphorothioate; note = sugar modification: 2-fluororibose
  modified_base 10: mod_base = m5c; mod_base = OTHER; note = sugar modification: 2-fluororibose; note = backbone modification: 5'-phosphorothioate
  modified_base 11: mod_base = OTHER; note = thymine; note = sugar modification: 2'-O-methoxyethylribose; note = backbone modification: 5'-phosphorothioate
  modified_base 12: mod_base = OTHER; note = backbone modification: 5'-phosphorothioate; note = sugar modification: 2'-O-methoxyethylribose; note = thymine
  modified_base 13: mod_base = m5c; mod_base = OTHER; note = sugar modification: 2'-O-methoxyethylribose; note = backbone modification: 5'-phosphorothioate
  modified_base 14: mod_base = OTHER; note = sugar modification: 2'-O-methoxyethylribose; note = backbone modification: 5'-phosphorothioate
  modified_base 15: mod_base = OTHER; note = thymine; note = backbone modification: 5'-phosphorothioate; note = sugar modification: 2'-O-methoxyethylribose
  modified_base 16: mod_base = m5c; mod_base = OTHER; note = sugar modification: lna
gttcttgtacttcatc

SEQ ID NO: 1400 - RNA, 16 nt, synthetic construct
  source 1..16: mol_type = other RNA; note = Antisense oligonucleotide
  modified_base 1: mod_base = OTHER; note = sugar modification: lna; note = backbone modification: 5'-phosphorothioate
  modified_base 2: mod_base = OTHER; note = thymine; note = backbone modification: 5'-phosphorothioate; note = sugar modification: 2-fluororibose
  modified_base 3: mod_base = OTHER; note = thymine; note = sugar modification: 2-fluororibose; note = backbone modification: 5'-phosphorothioate
  modified_base 4: mod_base = OTHER; mod_base = m5c; note = backbone modification: 5'-phosphorothioate; note = sugar modification: 2-fluororibose
  modified_base 5: mod_base = OTHER; note = sugar modification: 2-fluororibose; note = thymine; note = backbone modification: 5'-phosphorothioate
  modified_base 6: mod_base = OTHER; note = backbone modification: 5'-phosphorothioate; note = sugar modification: 2-fluororibose; note = thymine
  modified_base 7: mod_base = OTHER; note = sugar modification: 2-fluororibose; note = backbone modification: 5'-phosphorothioate
  modified_base 8: mod_base = OTHER; note = sugar modification: 2'-O-methoxyethylribose; note = thymine; note = backbone modification: 5'-phosphorothioate
  modified_base 9: mod_base = OTHER; note = sugar modification: 2'-O-methoxyethylribose; note = backbone modification: 5'-phosphorothioate
  modified_base 10: mod_base = m5c; mod_base = OTHER; note = backbone modification: 5'-phosphorothioate; note = sugar modification: 2-fluororibose
  modified_base 11: mod_base = OTHER; note = sugar modification: 2-fluororibose; note = thymine; note = backbone modification: 5'-phosphorothioate
  modified_base 12: mod_base = OTHER; note = thymine; note = sugar modification: 2-fluororibose; note = backbone modification: 5'-phosphorothioate
  modified_base 13: mod_base = OTHER; mod_base = m5c; note = sugar modification: 2-fluororibose; note = backbone modification: 5'-phosphorothioate
  modified_base 14: mod_base = OTHER; note = sugar modification: 2-fluororibose; note = backbone modification: 5'-phosphorothioate
  modified_base 15: mod_base = OTHER; note = backbone modification: 5'-phosphorothioate; note = thymine; note = sugar modification: 2-fluororibose
  modified_base 16: mod_base = m5c; mod_base = OTHER; note = sugar modification: lna
gttcttgtacttcatc

SEQ ID NO: 1401 - RNA, 16 nt, synthetic construct
  source 1..16: mol_type = other RNA; note = Antisense oligonucleotide
  modified_base 1: mod_base = OTHER; note = backbone modification: 5'-phosphorothioate; note = sugar modification: lna
  modified_base 2: mod_base = OTHER; note = backbone modification: 5'-phosphorothioate; note = sugar modification: 2-fluororibose; note = thymine
  modified_base 3: mod_base = OTHER; note = backbone modification: 5'-phosphorothioate; note = sugar modification: 2-fluororibose; note = thymine
  modified_base 4: mod_base = m5c; mod_base = OTHER; note = backbone modification: 5'-phosphorothioate; note = sugar modification: 2-fluororibose
  modified_base 5: mod_base = OTHER; note = backbone modification: 5'-phosphorothioate; note = thymine; note = sugar modification: 2-fluororibose
  modified_base 6: mod_base = OTHER; note = sugar modification: 2-fluororibose; note = thymine; note = backbone modification: 5'-phosphorothioate
  modified_base 7: mod_base = OTHER; note = backbone modification: 5'-phosphorothioate; note = sugar modification: 2'-O-methoxyethylribose
  modified_base 8: mod_base = OTHER; note = thymine; note = backbone modification: 5'-phosphorothioate; note = sugar modification: 2'-O-methoxyethylribose
  modified_base 9: mod_base = OTHER; note = sugar modification: 2'-O-methoxyethylribose; note = backbone modification: 5'-phosphorothioate
  modified_base 10: mod_base = OTHER; mod_base = m5c; note = sugar modification: 2'-O-methoxyethylribose; note = backbone modification: 5'-phosphorothioate
  modified_base 11: mod_base = OTHER; note = sugar modification: 2-fluororibose; note = backbone modification: 5'-phosphorothioate; note = thymine
  modified_base 12: mod_base = OTHER; note = thymine; note = sugar modification: 2-fluororibose; note = backbone modification: 5'-phosphorothioate
  modified_base 13: mod_base = OTHER; mod_base = m5c; note = backbone modification: 5'-phosphorothioate; note = sugar modification: 2-fluororibose
  modified_base 14: mod_base = OTHER; note = sugar modification: 2-fluororibose; note = backbone modification: 5'-phosphorothioate
  modified_base 15: mod_base = OTHER; note = thymine; note = backbone modification: 5'-phosphorothioate; note = sugar modification: 2-fluororibose
  modified_base 16: mod_base = OTHER; mod_base = m5c; note = sugar modification: lna
gttcttgtacttcatc

SEQ ID NO: 1402 - RNA, 16 nt, synthetic construct
  source 1..16: mol_type = other RNA; note = Antisense oligonucleotide
  modified_base 1: mod_base = OTHER; note = sugar modification: lna; note = backbone modification: 5'-phosphorothioate
  modified_base 2: mod_base = OTHER; note = sugar modification: 2'-O-methoxyethylribose; note = thymine; note = backbone modification: 5'-phosphorothioate
  modified_base 3: mod_base = OTHER; note = backbone modification: 5'-phosphorothioate; note = sugar modification: 2-fluororibose; note = thymine
  modified_base 4: mod_base = OTHER; mod_base = m5c; note = sugar modification: 2-fluororibose; note = backbone modification: 5'-phosphorothioate
  modified_base 5: mod_base = OTHER; note = backbone modification: 5'-phosphorothioate; note = sugar modification: 2-fluororibose; note = thymine
  modified_base 6: mod_base = OTHER; note = backbone modification: 5'-phosphorothioate; note = thymine; note = sugar modification: 2-fluororibose
  modified_base 7: mod_base = OTHER; note = backbone modification: 5'-phosphorothioate; note = sugar modification: 2-fluororibose
  modified_base 8: mod_base = OTHER; note = thymine; note = sugar modification: 2'-O-methoxyethylribose; note = backbone modification: 5'-phosphorothioate
  modified_base 9: mod_base = OTHER; note = backbone modification: 5'-phosphorothioate; note = sugar modification: 2'-O-methoxyethylribose
  modified_base 10: mod_base = m5c; mod_base = OTHER; note = backbone modification: 5'-phosphorothioate; note = sugar modification: 2-fluororibose
  modified_base 11: mod_base = OTHER; note = backbone modification: 5'-phosphorothioate; note = sugar modification: 2-fluororibose; note = thymine
  modified_base 12: mod_base = OTHER; note = thymine; note = backbone modification: 5'-phosphorothioate; note = sugar modification: 2-fluororibose
  modified_base 13: mod_base = OTHER; mod_base = m5c; note = backbone modification: 5'-phosphorothioate; note = sugar modification: 2-fluororibose
  modified_base 14: mod_base = OTHER; note = backbone modification: 5'-phosphorothioate; note = sugar modification: 2-fluororibose
  modified_base 15: mod_base = OTHER; note = backbone modification: 5'-phosphorothioate; note = thymine; note = sugar modification: 2'-O-methoxyethylribose
  modified_base 16: mod_base = OTHER; mod_base = m5c; note = sugar modification: lna
gttcttgtacttcatc

SEQ ID NO: 1403 - RNA, 16 nt, synthetic construct
  source 1..16: mol_type = other RNA; note = Antisense oligonucleotide
  modified_base 1: mod_base = OTHER; note = sugar modification: lna; note = backbone modification: 5'-phosphorothioate
  modified_base 2: mod_base = OTHER; note = backbone modification: 5'-phosphorothioate; note = thymine; note = sugar modification: 2'-O-methoxyethylribose
  modified_base 3: mod_base = OTHER; note = backbone modification: 5'-phosphorothioate; note = thymine; note = sugar modification: 2'-O-methoxyethylribose
  modified_base 4: mod_base = m5c; mod_base = OTHER; note = sugar modification: 2-fluororibose; note = backbone modification: 5'-phosphorothioate
  modified_base 5: mod_base = OTHER; note = sugar modification: 2-fluororibose; note = backbone modification: 5'-phosphorothioate; note = thymine
  modified_base 6: mod_base = OTHER; note = thymine; note = backbone modification: 5'-phosphorothioate; note = sugar modification: 2-fluororibose
  modified_base 7: mod_base = OTHER; note = backbone modification: 5'-phosphorothioate; note = sugar modification: 2-fluororibose
  modified_base 8: mod_base = OTHER; note = backbone modification: 5'-phosphorothioate; note = thymine; note = sugar modification: 2'-O-methoxyethylribose
  modified_base 9: mod_base = OTHER; note = sugar modification: 2'-O-methoxyethylribose; note = backbone modification: 5'-phosphorothioate
  modified_base 10: mod_base = m5c; mod_base = OTHER; note = backbone modification: 5'-phosphorothioate; note = sugar modification: 2-fluororibose
  modified_base 11: mod_base = OTHER; note = backbone modification: 5'-phosphorothioate; note = thymine; note = sugar modification: 2-fluororibose
  modified_base 12: mod_base = OTHER; note = sugar modification: 2-fluororibose; note = thymine; note = backbone modification: 5'-phosphorothioate
  modified_base 13: mod_base = OTHER; mod_base = m5c; note = sugar modification: 2-fluororibose; note = backbone modification: 5'-phosphorothioate
  modified_base 14: mod_base = OTHER; note = sugar modification: 2'-O-methoxyethylribose; note = backbone modification: 5'-phosphorothioate
  modified_base 15: mod_base = OTHER; note = backbone modification: 5'-phosphorothioate; note = sugar modification: 2'-O-methoxyethylribose; note = thymine
  modified_base 16: mod_base = OTHER; mod_base = m5c; note = sugar modification: lna
gttcttgtacttcatc

SEQ ID NO: 1404 - RNA, 16 nt, synthetic construct
  source 1..16: mol_type = other RNA; note = Antisense oligonucleotide
  modified_base 1: mod_base = OTHER; note = sugar modification: lna; note = backbone modification: 5'-phosphorothioate
  modified_base 2: mod_base = OTHER; note = sugar modification: 2'-O-methoxyethylribose; note = thymine; note = backbone modification: 5'-phosphorothioate
  modified_base 3: mod_base = OTHER; note = sugar modification: 2-fluororibose; note = backbone modification: 5'-phosphorothioate; note = thymine
  modified_base 4: mod_base = OTHER; mod_base = m5c; note = backbone modification: 5'-phosphorothioate; note = sugar modification: 2-fluororibose
  modified_base 5: mod_base = OTHER; note = backbone modification: 5'-phosphorothioate; note = thymine; note = sugar modification: 2-fluororibose
  modified_base 6: mod_base = OTHER; note = sugar modification: 2-fluororibose; note = backbone modification: 5'-phosphorothioate; note = thymine
  modified_base 7: mod_base = OTHER; note = sugar modification: 2'-O-methoxyethylribose; note = backbone modification: 5'-phosphorothioate
  modified_base 8: mod_base = OTHER; note = backbone modification: 5'-phosphorothioate; note = thymine; note = sugar modification: 2'-O-methoxyethylribose
  modified_base 9: mod_base = OTHER; note = sugar modification: 2'-O-methoxyethylribose; note = backbone modification: 5'-phosphorothioate
  modified_base 10: mod_base = m5c; mod_base = OTHER; note = backbone modification: 5'-phosphorothioate; note = sugar modification: 2'-O-methoxyethylribose
  modified_base 11: mod_base = OTHER; note = sugar modification: 2-fluororibose; note = backbone modification: 5'-phosphorothioate; note = thymine
  modified_base 12: mod_base = OTHER; note = thymine; note = backbone modification: 5'-phosphorothioate; note = sugar modification: 2-fluororibose
  modified_base 13: mod_base = m5c; mod_base = OTHER; note = sugar modification: 2-fluororibose; note = backbone modification: 5'-phosphorothioate
  modified_base 14: mod_base = OTHER; note = sugar modification: 2-fluororibose; note = backbone modification: 5'-phosphorothioate
  modified_base 15: mod_base = OTHER; note = thymine; note = sugar modification: 2'-O-methoxyethylribose; note = backbone modification: 5'-phosphorothioate
  modified_base 16: mod_base = OTHER; mod_base = m5c; note = sugar modification: lna
gttcttgtacttcatc

SEQ ID NO: 1405 - RNA, 16 nt, synthetic construct
  source 1..16: mol_type = other RNA; note = Antisense oligonucleotide
  modified_base 1: mod_base = OTHER; note = backbone modification: 5'-phosphorothioate; note = sugar modification: lna
  modified_base 2: mod_base = OTHER; note = backbone modification: 5'-phosphorothioate; note = sugar modification: 2-fluororibose
  modified_base 3: mod_base = OTHER; note = thymine; note = backbone modification: 5'-phosphorothioate; note = sugar modification: 2-fluororibose
  modified_base 4: mod_base = OTHER; note = backbone modification: 5'-phosphorothioate; note = sugar modification: 2-fluororibose
  modified_base 5: mod_base = OTHER; note = thymine; note = backbone modification: 5'-phosphorothioate; note = sugar modification: 2-fluororibose
  modified_base 6: mod_base = OTHER; note = backbone modification: 5'-phosphorothioate; note = thymine; note = sugar modification: 2-fluororibose
  modified_base 7: mod_base = m5c; mod_base = OTHER; note = sugar modification: 2-fluororibose; note = backbone modification: 5'-phosphorothioate
  modified_base 8: mod_base = OTHER; note = thymine; note = backbone modification: 5'-phosphorothioate; note = sugar modification: 2-fluororibose
  modified_base 9: mod_base = OTHER; note = thymine; note = sugar modification: 2-fluororibose; note = backbone modification: 5'-phosphorothioate
  modified_base 10: mod_base = OTHER; note = backbone modification: 5'-phosphorothioate; note = sugar modification: 2-fluororibose
  modified_base 11: mod_base = OTHER; note = backbone modification: 5'-phosphorothioate; note = sugar modification: 2-fluororibose; note = thymine
  modified_base 12: mod_base = OTHER; note = sugar modification: 2-fluororibose; note = backbone modification: 5'-phosphorothioate
  modified_base 13: mod_base = OTHER; mod_base = m5c; note = sugar modification: 2-fluororibose; note = backbone modification: 5'-phosphorothioate
  modified_base 14: mod_base = OTHER; note = thymine; note = sugar modification: 2-fluororibose; note = backbone modification: 5'-phosphorothioate
  modified_base 15: mod_base = OTHER; note = thymine; note = backbone modification: 5'-phosphorothioate; note = sugar modification: 2-fluororibose
  modified_base 16: mod_base = OTHER; mod_base = m5c; note = sugar modification: lna
ggtgttcttgtacttc

SEQ ID NO: 1406 - RNA, 16 nt, synthetic construct
  source 1..16: mol_type = other RNA; note = Antisense oligonucleotide
  modified_base 1: mod_base = OTHER; note = backbone modification: 5'-phosphorothioate; note = sugar modification: lna
  modified_base 2: mod_base = OTHER; note = sugar modification: 2'-O-methoxyethylribose; note = backbone modification: 5'-phosphorothioate
  modified_base 3: mod_base = OTHER; note = thymine; note = backbone modification: 5'-phosphorothioate; note = sugar modification: 2-fluororibose
  modified_base 4: mod_base = OTHER; note = sugar modification: 2-fluororibose; note = backbone modification: 5'-phosphorothioate
  modified_base 5: mod_base = OTHER; note = thymine; note = backbone modification: 5'-phosphorothioate; note = sugar modification: 2-fluororibose
  modified_base 6: mod_base = OTHER; note = backbone modification: 5'-phosphorothioate; note = thymine; note = sugar modification: 2-fluororibose
  modified_base 7: mod_base = OTHER; mod_base = m5c; note = backbone modification: 5'-phosphorothioate; note = sugar modification: 2-fluororibose
  modified_base 8: mod_base = OTHER; note = sugar modification: 2-fluororibose; note = backbone modification: 5'-phosphorothioate; note = thymine
  modified_base 9: mod_base = OTHER; note = backbone modification: 5'-phosphorothioate; note = thymine; note = sugar modification: 2-fluororibose
  modified_base 10: mod_base = OTHER; note = sugar modification: 2-fluororibose; note = backbone modification: 5'-phosphorothioate
  modified_base 11: mod_base = OTHER; note = sugar modification: 2-fluororibose; note = backbone modification: 5'-phosphorothioate; note = thymine
  modified_base 12: mod_base = OTHER; note = backbone modification: 5'-phosphorothioate; note = sugar modification: 2-fluororibose
  modified_base 13: mod_base = m5c; mod_base = OTHER; note = backbone modification: 5'-phosphorothioate; note = sugar modification: 2-fluororibose
  modified_base 14: mod_base = OTHER; note = backbone modification: 5'-phosphorothioate; note = sugar modification: 2-fluororibose; note = thymine
  modified_base 15: mod_base = OTHER; note = sugar modification: 2'-O-methoxyethylribose; note = thymine; note = backbone modification: 5'-phosphorothioate
  modified_base 16: mod_base = OTHER; mod_base = m5c; note = sugar modification: lna
ggtgttcttgtacttc

SEQ ID NO: 1407 - RNA, 16 nt, synthetic construct
  source 1..16: mol_type = other RNA; note = Antisense oligonucleotide
  modified_base 1: mod_base = OTHER; note = sugar modification: lna; note = backbone modification: 5'-phosphorothioate
  modified_base 2: mod_base = OTHER; note = sugar modification: 2'-O-methoxyethylribose; note = backbone modification: 5'-phosphorothioate
  modified_base 3: mod_base = OTHER; note = backbone modification: 5'-phosphorothioate; note = sugar modification: 2'-O-methoxyethylribose; note = thymine
  modified_base 4: mod_base = OTHER; note = backbone modification: 5'-phosphorothioate; note = sugar modification: 2-fluororibose
  modified_base 5: mod_base = OTHER; note = backbone modification: 5'-phosphorothioate; note = thymine; note = sugar modification: 2-fluororibose
  modified_base 6: mod_base = OTHER; note = thymine; note = sugar modification: 2-fluororibose; note = backbone modification: 5'-phosphorothioate
  modified_base 7: mod_base = OTHER; mod_base = m5c; note = backbone modification: 5'-phosphorothioate; note = sugar modification: 2-fluororibose
  modified_base 8: mod_base = OTHER; note = backbone modification: 5'-phosphorothioate; note = sugar modification: 2-fluororibose; note = thymine
  modified_base 9: mod_base = OTHER; note = thymine; note = sugar modification: 2-fluororibose; note = backbone modification: 5'-phosphorothioate
  modified_base 10: mod_base = OTHER; note = backbone modification: 5'-phosphorothioate; note = sugar modification: 2-fluororibose
  modified_base 11: mod_base = OTHER; note = sugar modification: 2-fluororibose; note = thymine; note = backbone modification: 5'-phosphorothioate
  modified_base 12: mod_base = OTHER; note = backbone modification: 5'-phosphorothioate; note = sugar modification: 2-fluororibose
  modified_base 13: mod_base = OTHER; mod_base = m5c; note = sugar modification: 2-fluororibose; note = backbone modification: 5'-phosphorothioate
  modified_base 14: mod_base = OTHER; note = thymine; note = sugar modification: 2'-O-methoxyethylribose; note = backbone modification: 5'-phosphorothioate
  modified_base 15: mod_base = OTHER; note = sugar modification: 2'-O-methoxyethylribose; note = thymine; note = backbone modification: 5'-phosphorothioate
  modified_base 16: mod_base = m5c; mod_base = OTHER; note = sugar modification: lna
ggtgttcttgtacttc

SEQ ID NO: 1408 - RNA, 16 nt, synthetic construct
  source 1..16: mol_type = other RNA; note = Antisense oligonucleotide
  modified_base 1: mod_base = OTHER; note = sugar modification: lna; note = backbone modification: 5'-phosphorothioate
  modified_base 2: mod_base = OTHER; note = backbone modification: 5'-phosphorothioate; note = sugar modification: 2'-O-methoxyethylribose
  modified_base 3: mod_base = OTHER; note = backbone modification: 5'-phosphorothioate; note = thymine; note = sugar modification: 2'-O-methoxyethylribose
  modified_base 4: mod_base = OTHER; note = sugar modification: 2'-O-methoxyethylribose; note = backbone modification: 5'-phosphorothioate
  modified_base 5: mod_base = OTHER; note = backbone modification: 5'-phosphorothioate; note = sugar modification: 2-fluororibose; note = thymine
  modified_base 6: mod_base = OTHER; note = sugar modification: 2-fluororibose; note = thymine; note = backbone modification: 5'-phosphorothioate
  modified_base 7: mod_base = m5c; mod_base = OTHER; note = sugar modification: 2-fluororibose; note = backbone modification: 5'-phosphorothioate
  modified_base 8: mod_base = OTHER; note = thymine; note = sugar modification: 2-fluororibose; note = backbone modification: 5'-phosphorothioate
  modified_base 9: mod_base = OTHER; note = thymine; note = backbone modification: 5'-phosphorothioate; note = sugar modification: 2-fluororibose
  modified_base 10: mod_base = OTHER; note = sugar modification: 2-fluororibose; note = backbone modification: 5'-phosphorothioate
  modified_base 11: mod_base = OTHER; note = sugar modification: 2-fluororibose; note = thymine; note = backbone modification: 5'-phosphorothioate
  modified_base 12: mod_base = OTHER; note = backbone modification: 5'-phosphorothioate; note = sugar modification: 2-fluororibose
  modified_base 13: mod_base = m5c; mod_base = OTHER; note = backbone modification: 5'-phosphorothioate; note = sugar modification: 2'-O-methoxyethylribose
  modified_base 14: mod_base = OTHER; note = thymine; note = sugar modification: 2'-O-methoxyethylribose; note = backbone modification: 5'-phosphorothioate
  modified_base 15: mod_base = OTHER; note = backbone modification: 5'-phosphorothioate; note = thymine; note = sugar modification: 2'-O-methoxyethylribose
  modified_base 16: mod_base = OTHER; mod_base = m5c; note = sugar modification: lna
ggtgttcttgtacttc

SEQ ID NO: 1409 - RNA, 16 nt, synthetic construct
  source 1..16: mol_type = other RNA; note = Antisense oligonucleotide
  modified_base 1: mod_base = OTHER; note = backbone modification: 5'-phosphorothioate; note = sugar modification: lna
  modified_base 2: mod_base = OTHER; note = backbone modification: 5'-phosphorothioate; note = sugar modification: 2'-O-methoxyethylribose
  modified_base 3: mod_base = OTHER; note = thymine; note = backbone modification: 5'-phosphorothioate; note = sugar modification: 2'-O-methoxyethylribose
  modified_base 4: mod_base = OTHER; note = sugar modification: 2'-O-methoxyethylribose; note = backbone modification: 5'-phosphorothioate
  modified_base 5: mod_base = OTHER; note = sugar modification: 2'-O-methoxyethylribose; note = thymine; note = backbone modification: 5'-phosphorothioate
  modified_base 6: mod_base = OTHER; note = backbone modification: 5'-phosphorothioate; note = sugar modification: 2-fluororibose; note = thymine
  modified_base 7: mod_base = m5c; mod_base = OTHER; note = sugar modification: 2-fluororibose; note = backbone modification: 5'-phosphorothioate
  modified_base 8: mod_base = OTHER; note = thymine; note = sugar modification: 2-fluororibose; note = backbone modification: 5'-phosphorothioate
  modified_base 9: mod_base = OTHER; note = sugar modification: 2-fluororibose; note = thymine; note = backbone modification: 5'-phosphorothioate
  modified_base 10: mod_base = OTHER; note = sugar modification: 2-fluororibose; note = backbone modification: 5'-phosphorothioate
  modified_base 11: mod_base = OTHER; note = sugar modification: 2-fluororibose; note = thymine; note = backbone modification: 5'-phosphorothioate
  modified_base 12: mod_base = OTHER; note = backbone modification: 5'-phosphorothioate; note = sugar modification: 2'-O-methoxyethylribose
  modified_base 13: mod_base = m5c; mod_base = OTHER; note = backbone modification: 5'-phosphorothioate; note = sugar modification: 2'-O-methoxyethylribose
  modified_base 14: mod_base = OTHER; note = thymine; note = backbone modification: 5'-phosphorothioate; note = sugar modification: 2'-O-methoxyethylribose
  modified_base 15: mod_base = OTHER; note = thymine; note = backbone modification: 5'-phosphorothioate; note = sugar modification: 2'-O-methoxyethylribose
  modified_base 16: mod_base = m5c; mod_base = OTHER; note = sugar modification: lna
ggtgttcttgtacttc

SEQ ID NO: 1410 - RNA, 16 nt, synthetic construct
  source 1..16: mol_type = other RNA; note = Antisense oligonucleotide
  modified_base 1: mod_base = OTHER; note = sugar modification: lna; note = backbone modification: 5'-phosphorothioate
  modified_base 2: mod_base = OTHER; note = sugar modification: 2'-O-methoxyethylribose; note = backbone modification: 5'-phosphorothioate
  modified_base 3: mod_base = OTHER; note = backbone modification: 5'-phosphorothioate; note = thymine; note = sugar modification: 2'-O-methoxyethylribose
  modified_base 4: mod_base = OTHER; note = backbone modification: 5'-phosphorothioate; note = sugar modification: 2'-O-methoxyethylribose
  modified_base 5: mod_base = OTHER; note = thymine; note = sugar modification: 2'-O-methoxyethylribose; note = backbone modification: 5'-phosphorothioate
  modified_base 6: mod_base = OTHER; note = backbone modification: 5'-phosphorothioate; note = thymine; note = sugar modification: 2'-O-methoxyethylribose
  modified_base 7: mod_base = OTHER; mod_base = m5c; note = sugar modification: 2-fluororibose; note = backbone modification: 5'-phosphorothioate
  modified_base 8: mod_base = OTHER; note = sugar modification: 2-fluororibose; note = thymine; note = backbone modification: 5'-phosphorothioate
  modified_base 9: mod_base = OTHER; note = sugar modification: 2-fluororibose; note = backbone modification: 5'-phosphorothioate; note = thymine
  modified_base 10: mod_base = OTHER; note = sugar modification: 2-fluororibose; note = backbone modification: 5'-phosphorothioate
  modified_base 11: mod_base = OTHER; note = thymine; note = backbone modification: 5'-phosphorothioate; note = sugar modification: 2'-O-methoxyethylribose
  modified_base 12: mod_base = OTHER; note = sugar modification: 2'-O-methoxyethylribose; note = backbone modification: 5'-phosphorothioate
  modified_base 13: mod_base = OTHER; mod_base = m5c; note = backbone modification: 5'-phosphorothioate; note = sugar modification: 2'-O-methoxyethylribose
  modified_base 14: mod_base = OTHER; note = backbone modification: 5'-phosphorothioate; note = thymine; note = sugar modification: 2'-O-methoxyethylribose
  modified_base 15: mod_base = OTHER; note = thymine; note = sugar modification: 2'-O-methoxyethylribose; note = backbone modification: 5'-phosphorothioate
  modified_base 16: mod_base = m5c; mod_base = OTHER; note = sugar modification: lna
ggtgttcttgtacttc

SEQ ID NO: 1411 - RNA, 16 nt, synthetic construct
  source 1..16: mol_type = other RNA; note = Antisense oligonucleotide
  modified_base 1: mod_base = OTHER; note = backbone modification: 5'-phosphorothioate; note = sugar modification: lna
  modified_base 2: mod_base = OTHER; note = sugar modification: 2-fluororibose; note = backbone modification: 5'-phosphorothioate
  modified_base 3: mod_base = OTHER; note = backbone modification: 5'-phosphorothioate; note = sugar modification: 2-fluororibose; note = thymine
  modified_base 4: mod_base = OTHER; note = backbone modification: 5'-phosphorothioate; note = sugar modification: 2-fluororibose
  modified_base 5: mod_base = OTHER; note = thymine; note = sugar modification: 2-fluororibose; note = backbone modification: 5'-phosphorothioate
  modified_base 6: mod_base = OTHER; note = backbone modification: 5'-phosphorothioate; note = sugar modification: 2-fluororibose; note = thymine
  modified_base 7: mod_base = OTHER; mod_base = m5c; note = backbone modification: 5'-phosphorothioate; note = sugar modification: 2-fluororibose
  modified_base 8: mod_base = OTHER; note = sugar modification: 2'-O-methoxyethylribose; note = thymine; note = backbone modification: 5'-phosphorothioate
  modified_base 9: mod_base = OTHER; note = sugar modification: 2'-O-methoxyethylribose; note = backbone modification: 5'-phosphorothioate; note = thymine
  modified_base 10: mod_base = OTHER; note = backbone modification: 5'-phosphorothioate; note = sugar modification: 2-fluororibose
  modified_base 11: mod_base = OTHER; note = thymine; note = backbone modification: 5'-phosphorothioate; note = sugar modification: 2-fluororibose
  modified_base 12: mod_base = OTHER; note = sugar modification: 2-fluororibose; note = backbone modification: 5'-phosphorothioate
  modified_base 13: mod_base = m5c; mod_base = OTHER; note = sugar modification: 2-fluororibose; note = backbone modification: 5'-phosphorothioate
  modified_base 14: mod_base = OTHER; note = thymine; note = backbone modification: 5'-phosphorothioate; note = sugar modification: 2-fluororibose
  modified_base 15: mod_base = OTHER; note = sugar modification: 2-fluororibose; note = backbone modification: 5'-phosphorothioate; note = thymine
  modified_base 16: mod_base = OTHER; mod_base = m5c; note = sugar modification: lna
ggtgttcttgtacttc

SEQ ID NO: 1412 - RNA, 16 nt, synthetic construct
  source 1..16: mol_type = other RNA; note = Antisense oligonucleotide
  modified_base 1: mod_base = OTHER; note = sugar modification: lna; note = backbone modification: 5'-phosphorothioate
  modified_base 2: mod_base = OTHER; note = backbone modification: 5'-phosphorothioate; note = sugar modification: 2-fluororibose
  modified_base 3: mod_base = OTHER; note = backbone modification: 5'-phosphorothioate; note = sugar modification: 2-fluororibose; note = thymine
  modified_base 4: mod_base = OTHER; note = backbone modification: 5'-phosphorothioate; note = sugar modification: 2-fluororibose
  modified_base 5: mod_base = OTHER; note = thymine; note = backbone modification: 5'-phosphorothioate; note = sugar modification: 2-fluororibose
  modified_base 6: mod_base = OTHER; note = backbone modification: 5'-phosphorothioate; note = sugar modification: 2-fluororibose; note = thymine
  modified_base 7: mod_base = OTHER; mod_base = m5c; note = sugar modification: 2'-O-methoxyethylribose; note = backbone modification: 5'-phosphorothioate
  modified_base 8: mod_base = OTHER; note = sugar modification: 2'-O-methoxyethylribose; note = thymine; note = backbone modification: 5'-phosphorothioate
  modified_base 9: mod_base = OTHER; note = sugar modification: 2'-O-methoxyethylribose; note = thymine; note = backbone modification: 5'-phosphorothioate
  modified_base 10: mod_base = OTHER; note = sugar modification: 2'-O-methoxyethylribose; note = backbone modification: 5'-phosphorothioate
  modified_base 11: mod_base = OTHER; note = thymine; note = backbone modification: 5'-phosphorothioate; note = sugar modification: 2-fluororibose
  modified_base 12: mod_base = OTHER; note = backbone modification: 5'-phosphorothioate; note = sugar modification: 2-fluororibose
  modified_base 13: mod_base = m5c; mod_base = OTHER; note = backbone modification: 5'-phosphorothioate; note = sugar modification: 2-fluororibose
  modified_base 14: mod_base = OTHER; note = sugar modification: 2-fluororibose; note = thymine; note = backbone modification: 5'-phosphorothioate
  modified_base 15: mod_base = OTHER; note = thymine; note = sugar modification: 2-fluororibose; note = backbone modification: 5'-phosphorothioate
  modified_base 16: mod_base = OTHER; mod_base = m5c; note = sugar modification: lna
ggtgttcttgtacttc

SEQ ID NO: 1413 - RNA, 16 nt, synthetic construct
  source 1..16: mol_type = other RNA; note = Antisense oligonucleotide
  modified_base 1: mod_base = OTHER; note = backbone modification: 5'-phosphorothioate; note = sugar modification: lna
  modified_base 2: mod_base = OTHER; note = backbone modification: 5'-phosphorothioate; note = sugar modification: 2'-O-methoxyethylribose
  modified_base 3: mod_base = OTHER; note = sugar modification: 2-fluororibose; note = thymine; note = backbone modification: 5'-phosphorothioate
  modified_base 4: mod_base = OTHER; note = sugar modification: 2-fluororibose; note = backbone modification: 5'-phosphorothioate
  modified_base 5: mod_base = OTHER; note = sugar modification: 2-fluororibose; note = thymine; note = backbone modification: 5'-phosphorothioate
  modified_base 6: mod_base = OTHER; note = thymine; note = backbone modification: 5'-phosphorothioate; note = sugar modification: 2-fluororibose
  modified_base 7: mod_base = m5c; mod_base = OTHER; note = backbone modification: 5'-phosphorothioate; note = sugar modification: 2-fluororibose
  modified_base 8: mod_base = OTHER; note = backbone modification: 5'-phosphorothioate; note = sugar modification: 2'-O-methoxyethylribose; note = thymine
  modified_base 9: mod_base = OTHER; note = sugar modification: 2'-O-methoxyethylribose; note = backbone modification: 5'-phosphorothioate; note = thymine
  modified_base 10: mod_base = OTHER; note = backbone modification: 5'-phosphorothioate; note = sugar modification: 2-fluororibose
  modified_base 11: mod_base = OTHER; note = sugar modification: 2-fluororibose; note = thymine; note = backbone modification: 5'-phosphorothioate
  modified_base 12: mod_base = OTHER; note = backbone modification: 5'-phosphorothioate; note = sugar modification: 2-fluororibose
  modified_base 13: mod_base = m5c; mod_base = OTHER; note = backbone modification: 5'-phosphorothioate; note = sugar modification: 2-fluororibose
  modified_base 14: mod_base = OTHER; note = sugar modification: 2-fluororibose; note = backbone modification: 5'-phosphorothioate; note = thymine
  modified_base 15: mod_base = OTHER; note = backbone modification: 5'-phosphorothioate; note = thymine; note = sugar modification: 2'-O-methoxyethylribose
  modified_base 16: mod_base = m5c; mod_base = OTHER; note = sugar modification: lna
ggtgttcttgtacttc

SEQ ID NO: 1414 - RNA, 16 nt, synthetic construct
  source 1..16: mol_type = other RNA; note = Antisense oligonucleotide
  modified_base 1: mod_base = OTHER; note = backbone modification: 5'-phosphorothioate; note = sugar modification: lna
  modified_base 2: mod_base = OTHER; note = sugar modification: 2'-O-methoxyethylribose; note = backbone modification: 5'-phosphorothioate
  modified_base 3: mod_base = OTHER; note = backbone modification: 5'-phosphorothioate; note = thymine; note = sugar modification: 2'-O-methoxyethylribose
  modified_base 4: mod_base = OTHER; note = sugar modification: 2-fluororibose; note = backbone modification: 5'-phosphorothioate
  modified_base 5: mod_base = OTHER; note = backbone modification: 5'-phosphorothioate; note = sugar modification: 2-fluororibose; note = thymine
  modified_base 6: mod_base = OTHER; note = thymine; note = backbone modification: 5'-phosphorothioate; note = sugar modification: 2-fluororibose
  modified_base 7: mod_base = m5c; mod_base = OTHER; note = backbone modification: 5'-phosphorothioate; note = sugar modification: 2-fluororibose
  modified_base 8: mod_base = OTHER; note = thymine; note = sugar modification: 2'-O-methoxyethylribose; note = backbone modification: 5'-phosphorothioate
  modified_base 9: mod_base = OTHER; note = thymine; note = sugar modification: 2'-O-methoxyethylribose; note = backbone modification: 5'-phosphorothioate
  modified_base 10: mod_base = OTHER; note = backbone modification: 5'-phosphorothioate; note = sugar modification: 2-fluororibose
  modified_base 11: mod_base = OTHER; note = sugar modification: 2-fluororibose; note = backbone modification: 5'-phosphorothioate; note = thymine
  modified_base 12: mod_base = OTHER; note = sugar modification: 2-fluororibose; note = backbone modification: 5'-phosphorothioate
  modified_base 13: mod_base = m5c; mod_base = OTHER; note = sugar modification: 2-fluororibose; note = backbone modification: 5'-phosphorothioate
  modified_base 14: mod_base = OTHER; note = thymine; note = backbone modification: 5'-phosphorothioate; note = sugar modification: 2'-O-methoxyethylribose
  modified_base 15: mod_base = OTHER; note = backbone modification: 5'-phosphorothioate; note = thymine; note = sugar modification: 2'-O-methoxyethylribose
  modified_base 16: mod_base = m5c; mod_base = OTHER; note = sugar modification: lna
ggtgttcttgtacttc

SEQ ID NO: 1415 - RNA, 16 nt, synthetic construct
  source 1..16: mol_type = other RNA; note = Antisense oligonucleotide
  modified_base 1: mod_base = OTHER; note = backbone modification: 5'-phosphorothioate; note = sugar modification: lna
  modified_base 2: mod_base = OTHER; note = sugar modification: 2'-O-methoxyethylribose; note = backbone modification: 5'-phosphorothioate
  modified_base 3: mod_base = OTHER; note = thymine; note = sugar modification: 2-fluororibose; note = backbone modification: 5'-phosphorothioate
  modified_base 4: mod_base = OTHER; note = backbone modification: 5'-phosphorothioate; note = sugar modification: 2-fluororibose
  modified_base 5: mod_base = OTHER; note = backbone modification: 5'-phosphorothioate; note = sugar modification: 2-fluororibose; note = thymine
  modified_base 6: mod_base = OTHER; note = thymine; note = backbone modification: 5'-phosphorothioate; note = sugar modification: 2-fluororibose
  modified_base 7: mod_base = OTHER; mod_base = m5c; note = backbone modification: 5'-phosphorothioate; note = sugar modification: 2'-O-methoxyethylribose
  modified_base 8: mod_base = OTHER; note = thymine; note = sugar modification: 2'-O-methoxyethylribose; note = backbone modification: 5'-phosphorothioate
  modified_base 9: mod_base = OTHER; note = sugar modification: 2'-O-methoxyethylribose; note = backbone modification: 5'-phosphorothioate; note = thymine
  modified_base 10: mod_base = OTHER; note = backbone modification: 5'-phosphorothioate; note = sugar modification: 2'-O-methoxyethylribose
  modified_base 11: mod_base = OTHER; note = sugar modification: 2-fluororibose; note = backbone modification: 5'-phosphorothioate; note = thymine
  modified_base 12: mod_base = OTHER; note = backbone modification: 5'-phosphorothioate; note = sugar modification: 2-fluororibose
  modified_base 13: mod_base = OTHER; mod_base = m5c; note = backbone modification: 5'-phosphorothioate; note = sugar modification: 2-fluororibose
  modified_base 14: mod_base = OTHER; note = thymine; note = sugar modification: 2-fluororibose; note = backbone modification: 5'-phosphorothioate
  modified_base 15: mod_base = OTHER; note = thymine; note = sugar modification: 2'-O-methoxyethylribose; note = backbone modification: 5'-phosphorothioate
  modified_base 16: mod_base = m5c; mod_base = OTHER; note = sugar modification: lna
ggtgttcttgtacttc

SEQ ID NO: 1416 - RNA, 18 nt, synthetic construct
  source 1..18: mol_type = other RNA; note = Antisense oligonucleotide
  modified_base 1: mod_base = m5c; mod_base = OTHER; note = sugar modification: lna; note = backbone modification: 5'-phosphorothioate
  modified_base 2: mod_base = OTHER; note = sugar modification: 2'-O-methoxyethylribose; note = backbone modification: 5'-phosphorothioate; note = thymine
  modified_base 3: mod_base = OTHER; note = backbone modification: 5'-phosphorothioate; note = sugar modification: 2'-O-methoxyethylribose
  modified_base 4: mod_base = OTHER; note = backbone modification: 5'-phosphorothioate; note = sugar modification: 2'-O-methoxyethylribose
  modified_base 5: mod_base = OTHER; note = backbone modification: 5'-phosphorothioate; note = sugar modification: 2'-O-methoxyethylribose
  modified_base 6: mod_base = OTHER; note = thymine; note = backbone modification: 5'-phosphorothioate; note = sugar modification: 2'-O-methoxyethylribose
  modified_base 7: mod_base = OTHER; note = backbone modification: 5'-phosphorothioate; note = thymine; note = sugar modification: 2'-O-methoxyethylribose
  modified_base 8: mod_base = m5c; mod_base = OTHER; note = backbone modification: 5'-phosphorothioate; note = sugar modification: 2'-O-methoxyethylribose
  modified_base 9: mod_base = OTHER; note = thymine; note = sugar modification: 2'-O-methoxyethylribose; note = backbone modification: 5'-phosphorothioate
  modified_base 10: mod_base = OTHER; note = backbone modification: 5'-phosphorothioate; note = sugar modification: 2'-O-methoxyethylribose; note = thymine
  modified_base 11: mod_base = OTHER; note = thymine; note = sugar modification: 2'-O-methoxyethylribose; note = backbone modification: 5'-phosphorothioate
  modified_base 12: mod_base = m5c; mod_base = OTHER; note = backbone modification: 5'-phosphorothioate; note = sugar modification: 2'-O-methoxyethylribose
  modified_base 13: mod_base = OTHER; note = sugar modification: 2'-O-methoxyethylribose; note = backbone modification: 5'-phosphorothioate
  modified_base 14: mod_base = OTHER; note = sugar modification: 2'-O-methoxyethylribose; note = backbone modification: 5'-phosphorothioate
  modified_base 15: mod_base = m5c; mod_base = OTHER; note = sugar modification: 2'-O-methoxyethylribose; note = backbone modification: 5'-phosphorothioate
  modified_base 16: mod_base = OTHER; note = sugar modification: 2'-O-methoxyethylribose; note = backbone modification: 5'-phosphorothioate; note = thymine
  modified_base 17: mod_base = OTHER; note = backbone modification: 5'-phosphorothioate; note = sugar modification: 2'-O-methoxyethylribose
  modified_base 18: mod_base = OTHER; note = sugar modification: 2'-O-methoxyethylribose
ctgaattctttcaactag

SEQ ID NO: 1417 - RNA, 18 nt, synthetic construct
  source 1..18: mol_type = other RNA; note = Antisense oligonucleotide
  modified_base 1: mod_base = OTHER; mod_base = m5c; note = backbone modification: 5'-phosphorothioate; note = sugar modification: 2'-O-methoxyethylribose
  modified_base 2: mod_base = OTHER; note = sugar modification: 2'-O-methoxyethylribose; note = thymine; note = backbone modification: 5'-phosphorothioate
  modified_base 3: mod_base = OTHER; note = sugar modification: 2'-O-methoxyethylribose; note = backbone modification: 5'-phosphorothioate
  modified_base 4: mod_base = OTHER; note = backbone modification: 5'-phosphorothioate; note = sugar modification: 2'-O-methoxyethylribose
  modified_base 5: mod_base = OTHER; note = sugar modification: 2'-O-methoxyethylribose; note = backbone modification: 5'-phosphorothioate
  modified_base 6: mod_base = OTHER; note = thymine; note = backbone modification: 5'-phosphorothioate; note = sugar modification: 2'-O-methoxyethylribose
  modified_base 7: mod_base = OTHER; note = sugar modification: 2'-O-methoxyethylribose; note = thymine; note = backbone modification: 5'-phosphorothioate
  modified_base 8: mod_base = m5c; mod_base = OTHER; note = backbone modification: 5'-phosphorothioate; note = sugar modification: 2'-O-methoxyethylribose
  modified_base 9: mod_base = OTHER; note = backbone modification: 5'-phosphorothioate; note = thymine; note = sugar modification: 2'-O-methoxyethylribose
  modified_base 10: mod_base = OTHER; note = sugar modification: 2'-O-methoxyethylribose; note = thymine; note = backbone modification: 5'-phosphorothioate
  modified_base 11: mod_base = OTHER; note = sugar modification: 2'-O-methoxyethylribose; note = backbone modification: 5'-phosphorothioate; note = thymine
  modified_base 12: mod_base = m5c; mod_base = OTHER; note = backbone modification: 5'-phosphorothioate; note = sugar modification: 2'-O-methoxyethylribose
  modified_base 13: mod_base = OTHER; note = sugar modification: 2'-O-methoxyethylribose; note = backbone modification: 5'-phosphorothioate
  modified_base 14: mod_base = OTHER; note = sugar modification: 2'-O-methoxyethylribose; note = backbone modification: 5'-phosphorothioate
  modified_base 15: mod_base = m5c; mod_base = OTHER; note = backbone modification: 5'-phosphorothioate; note = sugar modification: 2'-O-methoxyethylribose
  modified_base 16: mod_base = OTHER; note = backbone modification: 5'-phosphorothioate; note = thymine; note = sugar modification: 2'-O-methoxyethylribose
  modified_base 17: mod_base = OTHER; note = sugar modification: 2'-O-methoxyethylribose; note = backbone modification: 5'-phosphorothioate
  modified_base 18: mod_base = OTHER; note = sugar modification: lna
ctgaattctttcaactag

SEQ ID NO: 1418 - RNA, 18 nt, synthetic construct
  source 1..18: mol_type = other RNA; note = Antisense oligonucleotide
  modified_base 1: mod_base = m5c; mod_base = OTHER; note = sugar modification: lna; note = backbone modification: 5'-phosphorothioate
  modified_base 2: mod_base = OTHER; note = sugar modification: 2'-O-methoxyethylribose; note = backbone modification: 5'-phosphorothioate; note = thymine
  modified_base 3: mod_base = OTHER; note = backbone modification: 5'-phosphorothioate; note = sugar modification: 2'-O-methoxyethylribose
  modified_base 4: mod_base = OTHER; note = backbone modification: 5'-phosphorothioate; note = sugar modification: 2'-O-methoxyethylribose
  modified_base 5: mod_base = OTHER; note = sugar modification: 2'-O-methoxyethylribose; note = backbone modification: 5'-phosphorothioate
  modified_base 6: mod_base = OTHER; note = thymine; note = sugar modification: 2'-O-methoxyethylribose; note = backbone modification: 5'-phosphorothioate
  modified_base 7: mod_base = OTHER; note = backbone modification: 5'-phosphorothioate; note = thymine; note = sugar modification: 2'-O-methoxyethylribose
  modified_base 8: mod_base = m5c; mod_base = OTHER; note = backbone modification: 5'-phosphorothioate; note = sugar modification: 2'-O-methoxyethylribose
  modified_base 9: mod_base = OTHER; note = backbone modification: 5'-phosphorothioate; note = thymine; note = sugar modification: 2'-O-methoxyethylribose
  modified_base 10: mod_base = OTHER; note = backbone modification: 5'-phosphorothioate; note = sugar modification: 2'-O-methoxyethylribose; note = thymine
  modified_base 11: mod_base = OTHER; note = sugar modification: 2'-O-methoxyethylribose; note = thymine; note = backbone modification: 5'-phosphorothioate
  modified_base 12: mod_base = OTHER; mod_base = m5c; note = sugar modification: 2'-O-methoxyethylribose; note = backbone modification: 5'-phosphorothioate
  modified_base 13: mod_base = OTHER; note = backbone modification: 5'-phosphorothioate; note = sugar modification: 2'-O-methoxyethylribose
  modified_base 14: mod_base = OTHER; note = backbone modification: 5'-phosphorothioate; note = sugar modification: 2'-O-methoxyethylribose
  modified_base 15: mod_base = m5c; mod_base = OTHER; note = sugar modification: 2'-O-methoxyethylribose; note = backbone modification: 5'-phosphorothioate
  modified_base 16: mod_base = OTHER; note = sugar modification: 2'-O-methoxyethylribose; note = backbone modification: 5'-phosphorothioate; note = thymine
  modified_base 17: mod_base = OTHER; note = backbone modification: 5'-phosphorothioate; note = sugar modification: 2'-O-methoxyethylribose
  modified_base 18: mod_base = OTHER; note = sugar modification: lna
ctgaattctttcaactag

SEQ ID NO: 1419 - RNA, 18 nt, synthetic construct
  source 1..18: mol_type = other RNA; note = Antisense oligonucleotide
  modified_base 1: mod_base = m5c; mod_base = OTHER; note = sugar modification: lna; note = backbone modification: 5'-phosphorothioate
  modified_base 2: mod_base = OTHER; note = backbone modification: 5'-phosphorothioate; note = thymine; note = sugar modification: lna
  modified_base 3: mod_base = OTHER; note = sugar modification: 2'-O-methoxyethylribose; note = backbone modification: 5'-phosphorothioate
  modified_base 4: mod_base = OTHER; note = backbone modification: 5'-phosphorothioate; note = sugar modification: 2'-O-methoxyethylribose
  modified_base 5: mod_base = OTHER; note = backbone modification: 5'-phosphorothioate; note = sugar modification: 2'-O-methoxyethylribose
  modified_base 6: mod_base = OTHER; note = sugar modification: 2'-O-methoxyethylribose; note = backbone modification: 5'-phosphorothioate; note = thymine
  modified_base 7: mod_base = OTHER; note = backbone modification: 5'-phosphorothioate; note = sugar modification: 2'-O-methoxyethylribose; note = thymine
  modified_base 8: mod_base = m5c; mod_base = OTHER; note = sugar modification: 2'-O-methoxyethylribose; note = backbone modification: 5'-phosphorothioate
  modified_base 9: mod_base = OTHER; note = sugar modification: 2'-O-methoxyethylribose; note = backbone modification: 5'-phosphorothioate; note = thymine
  modified_base 10: mod_base = OTHER; note = sugar modification: 2'-O-methoxyethylribose; note = thymine; note = backbone modification: 5'-phosphorothioate
  modified_base 11: mod_base = OTHER; note = thymine; note = backbone modification: 5'-phosphorothioate; note = sugar modification: 2'-O-methoxyethylribose
  modified_base 12: mod_base = OTHER; mod_base = m5c; note = backbone modification: 5'-phosphorothioate; note = sugar modification: 2'-O-methoxyethylribose
  modified_base 13: mod_base = OTHER; note = backbone modification: 5'-phosphorothioate; note = sugar modification: 2'-O-methoxyethylribose
  modified_base 14: mod_base = OTHER; note = sugar modification: 2'-O-methoxyethylribose; note = backbone modification: 5'-phosphorothioate
  modified_base 15: mod_base = OTHER; mod_base = m5c; note = backbone modification: 5'-phosphorothioate; note = sugar modification: 2'-O-methoxyethylribose
  modified_base 16: mod_base = OTHER; note = sugar modification: 2'-O-methoxyethylribose; note = backbone modification: 5'-phosphorothioate; note = thymine
  modified_base 17: mod_base = OTHER; note = backbone modification: 5'-phosphorothioate; note = sugar modification: 2'-O-methoxyethylribose
  modified_base 18: mod_base = OTHER; note = sugar modification: 2'-O-methoxyethylribose
ctgaattctttcaactag

SEQ ID NO: 1420 - RNA, 18 nt, synthetic construct
  source 1..18: mol_type = other RNA; note = Antisense oligonucleotide
  modified_base 1: mod_base = OTHER; mod_base = m5c; note = backbone modification: 5'-phosphorothioate; note = sugar modification: 2'-O-methoxyethylribose
  modified_base 2: mod_base = OTHER; note = backbone modification: 5'-phosphorothioate; note = thymine; note = sugar modification: 2'-O-methoxyethylribose
  modified_base 3: mod_base = OTHER; note = sugar modification: 2'-O-methoxyethylribose; note = backbone modification: 5'-phosphorothioate
  modified_base 4: mod_base = OTHER; note = sugar modification: 2'-O-methoxyethylribose; note = backbone modification: 5'-phosphorothioate
  modified_base 5: mod_base = OTHER; note = backbone modification: 5'-phosphorothioate; note = sugar modification: 2'-O-methoxyethylribose
  modified_base 6: mod_base = OTHER; note = backbone modification: 5'-phosphorothioate; note = thymine; note = sugar modification: 2'-O-methoxyethylribose
  modified_base 7: mod_base = OTHER; note = sugar modification: 2'-O-methoxyethylribose; note = backbone modification: 5'-phosphorothioate; note = thymine
  modified_base 8: mod_base = m5c; mod_base = OTHER; note = backbone modification: 5'-phosphorothioate; note = sugar modification: 2'-O-methoxyethylribose
  modified_base 9: mod_base = OTHER; note = sugar modification: 2'-O-methoxyethylribose; note = backbone modification: 5'-phosphorothioate; note = thymine
  modified_base 10: mod_base = OTHER; note = thymine; note = sugar modification: 2'-O-methoxyethylribose; note = backbone modification: 5'-phosphorothioate
  modified_base 11: mod_base = OTHER; note = sugar modification: 2'-O-methoxyethylribose; note = thymine; note = backbone modification: 5'-phosphorothioate
  modified_base 12: mod_base = OTHER; mod_base = m5c; note = backbone modification: 5'-phosphorothioate; note = sugar modification: 2'-O-methoxyethylribose
  modified_base 13: mod_base = OTHER; note = backbone modification: 5'-phosphorothioate; note = sugar modification: 2'-O-methoxyethylribose
  modified_base 14: mod_base = OTHER; note = sugar modification: 2'-O-methoxyethylribose; note = backbone modification: 5'-phosphorothioate
  modified_base 15: mod_base = OTHER; mod_base = m5c; note = backbone modification: 5'-phosphorothioate; note = sugar modification: 2'-O-methoxyethylribose
  modified_base 16: mod_base = OTHER; note = sugar modification: 2'-O-methoxyethylribose; note = thymine; note = backbone modification: 5'-phosphorothioate
  modified_base 17: mod_base = OTHER; note = sugar modification: lna; note = backbone modification: 5'-phosphorothioate
  modified_base 18: mod_base = OTHER; note = sugar modification: lna
ctgaattctttcaactag

SEQ ID NO: 1421 - RNA, 18 nt, synthetic construct
  source 1..18: mol_type = other RNA; note = Antisense oligonucleotide
  modified_base 1: mod_base = m5c; mod_base = OTHER; note = sugar modification: lna; note = backbone modification: 5'-phosphorothioate
  modified_base 2: mod_base = OTHER; note = thymine; note = sugar modification: 2'-O-methoxyethylribose; note = backbone modification: 5'-phosphorothioate
  modified_base 3: mod_base = OTHER; note = backbone modification: 5'-phosphorothioate; note = sugar modification: 2'-O-methoxyethylribose
  modified_base 4: mod_base = OTHER; note = sugar modification: 2'-O-methoxyethylribose; note = backbone modification: 5'-phosphorothioate
  modified_base 5: mod_base = OTHER; note = backbone modification: 5'-phosphorothioate; note = sugar modification: 2'-O-methoxyethylribose
  modified_base 6: mod_base = OTHER; note = backbone modification: 5'-phosphorothioate; note = thymine; note = sugar modification: 2'-O-methoxyethylribose
  modified_base 7: mod_base = OTHER; note = backbone modification: 5'-phosphorothioate; note = thymine; note = sugar modification: 2'-O-methoxyethylribose
  modified_base 8: mod_base = OTHER; mod_base = m5c; note = sugar modification: 2'-O-methoxyethylribose; note = backbone modification: 5'-phosphorothioate
  modified_base 9: mod_base = OTHER; note = sugar modification: 2'-O-methoxyethylribose; note = thymine; note = backbone modification: 5'-phosphorothioate
  modified_base 10: mod_base = OTHER; note = thymine; note = backbone modification: 5'-phosphorothioate; note = sugar modification: 2'-O-methoxyethylribose
  modified_base 11: mod_base = OTHER; note = sugar modification: 2'-O-methoxyethylribose; note = backbone modification: 5'-phosphorothioate; note = thymine
  modified_base 12: mod_base = m5c; mod_base = OTHER; note = sugar modification: 2'-O-methoxyethylribose; note = backbone modification: 5'-phosphorothioate
  modified_base 13: mod_base = OTHER; note = backbone modification: 5'-phosphorothioate; note = sugar modification: 2'-O-methoxyethylribose
  modified_base 14: mod_base = OTHER; note = backbone modification: 5'-phosphorothioate; note = sugar modification: 2'-O-methoxyethylribose
  modified_base 15: mod_base = OTHER; mod_base = m5c; note = backbone modification: 5'-phosphorothioate; note = sugar modification: 2'-O-methoxyethylribose
  modified_base 16: mod_base = OTHER; note = backbone modification: 5'-phosphorothioate; note = thymine; note = sugar modification: 2'-O-methoxyethylribose
  modified_base 17: mod_base = OTHER; note = backbone modification: 5'-phosphorothioate; note = sugar modification: lna
  modified_base 18: mod_base = OTHER; note = sugar modification: lna
ctgaattctttcaactag

SEQ ID NO: 1422 - RNA, 18 nt, synthetic construct
  source 1..18: mol_type = other RNA; note = Antisense oligonucleotide
  modified_base 1: mod_base = OTHER; mod_base = m5c; note = backbone modification: 5'-phosphorothioate; note = sugar modification: lna
  modified_base 2: mod_base = OTHER; note = backbone modification: 5'-phosphorothioate; note = sugar modification: lna; note = thymine
  modified_base 3: mod_base = OTHER; note = backbone modification: 5'-phosphorothioate; note = sugar modification: 2'-O-methoxyethylribose
  modified_base 4: mod_base = OTHER; note = sugar modification: 2'-O-methoxyethylribose; note = backbone modification: 5'-phosphorothioate
  modified_base 5: mod_base = OTHER; note = sugar modification: 2'-O-methoxyethylribose; note = backbone modification: 5'-phosphorothioate
  modified_base 6: mod_base = OTHER; note = thymine; note = backbone modification: 5'-phosphorothioate; note = sugar modification: 2'-O-methoxyethylribose
  modified_base 7: mod_base = OTHER; note = sugar modification: 2'-O-methoxyethylribose; note = thymine; note = backbone modification: 5'-phosphorothioate
  modified_base 8: mod_base = m5c; mod_base = OTHER; note = backbone modification: 5'-phosphorothioate; note = sugar modification: 2'-O-methoxyethylribose
  modified_base 9: mod_base = OTHER; note = sugar modification: 2'-O-methoxyethylribose; note = backbone modification: 5'-phosphorothioate; note = thymine
  modified_base 10: mod_base = OTHER; note = backbone modification: 5'-phosphorothioate; note = thymine; note = sugar modification: 2'-O-methoxyethylribose
  modified_base 11: mod_base = OTHER; note = thymine; note = sugar modification: 2'-O-methoxyethylribose; note = backbone modification: 5'-phosphorothioate
  modified_base 12: mod_base = OTHER; mod_base = m5c; note = sugar modification: 2'-O-methoxyethylribose; note = backbone modification: 5'-phosphorothioate
  modified_base 13: mod_base = OTHER; note = sugar modification: 2'-O-methoxyethylribose; note = backbone modification: 5'-phosphorothioate
  modified_base 14: mod_base = OTHER; note = sugar modification: 2'-O-methoxyethylribose; note = backbone modification: 5'-phosphorothioate
  modified_base 15: mod_base = m5c; mod_base = OTHER; note = backbone modification: 5'-phosphorothioate; note = sugar modification: 2'-O-methoxyethylribose
  modified_base 16: mod_base = OTHER; note = sugar modification: 2'-O-methoxyethylribose; note = backbone modification: 5'-phosphorothioate; note = thymine
  modified_base 17: mod_base = OTHER; note = backbone modification: 5'-phosphorothioate; note = sugar modification: 2'-O-methoxyethylribose
  modified_base 18: mod_base = OTHER; note = sugar modification: lna
ctgaattctttcaactag

SEQ ID NO: 1423 - RNA, 20 nt, synthetic construct
  source 1..20: mol_type = other RNA; note = Antisense oligonucleotide
  modified_base 1: mod_base = OTHER; note = backbone modification: 5'-phosphorothioate; note = sugar modification: lna
  modified_base 2: mod_base = OTHER; note = sugar modification: 2'-O-methoxyethylribose; note = backbone modification: 5'-phosphorothioate
  modified_base 3: mod_base = OTHER; note = thymine; note = sugar modification: 2'-O-methoxyethylribose; note = backbone modification: 5'-phosphorothioate
  modified_base 4: mod_base = OTHER; note = thymine; note = backbone modification: 5'-phosphorothioate; note = sugar modification: 2'-O-methoxyethylribose
  modified_base 5: mod_base = m5c; mod_base = OTHER; note = sugar modification: 2'-O-methoxyethylribose; note = backbone modification: 5'-phosphorothioate
  modified_base 6: mod_base = OTHER; note = thymine; note = sugar modification: 2'-O-methoxyethylribose; note = backbone modification: 5'-phosphorothioate
  modified_base 7: mod_base = OTHER; note = backbone modification: 5'-phosphorothioate; note = sugar modification: 2'-O-methoxyethylribose
  modified_base 8: mod_base = OTHER; note = sugar modification: 2'-O-methoxyethylribose; note = backbone modification: 5'-phosphorothioate
  modified_base 9: mod_base = OTHER; note = sugar modification: 2'-O-methoxyethylribose; note = backbone modification: 5'-phosphorothioate
  modified_base 10: mod_base = OTHER; note = thymine; note = backbone modification: 5'-phosphorothioate; note = sugar modification: 2'-O-methoxyethylribose
  modified_base 11: mod_base = OTHER; note = sugar modification: 2'-O-methoxyethylribose; note = thymine; note = backbone modification: 5'-phosphorothioate
  modified_base 12: mod_base = OTHER; mod_base = m5c; note = backbone modification: 5'-phosphorothioate; note = sugar modification: 2'-O-methoxyethylribose
  modified_base 13: mod_base = OTHER; note = backbone modification: 5'-phosphorothioate; note = thymine; note = sugar modification: 2'-O-methoxyethylribose
  modified_base 14: mod_base = OTHER; note = thymine; note = backbone modification: 5'-phosphorothioate; note = sugar modification: 2'-O-methoxyethylribose
  modified_base 15: mod_base = OTHER; note = thymine; note = backbone modification: 5'-phosphorothioate; note = sugar modification: 2'-O-methoxyethylribose
  modified_base 16: mod_base = m5c; mod_base = OTHER; note = backbone modification: 5'-phosphorothioate; note = sugar modification: 2'-O-methoxyethylribose
  modified_base 17: mod_base = OTHER; note = backbone modification: 5'-phosphorothioate; note = sugar modification: 2'-O-methoxyethylribose
  modified_base 18: mod_base = OTHER; note = backbone modification: 5'-phosphorothioate; note = sugar modification: 2'-O-methoxyethylribose
  modified_base 19: mod_base = OTHER; mod_base = m5c; note = sugar modification: 2'-O-methoxyethylribose; note = backbone modification: 5'-phosphorothioate
  modified_base 20: mod_base = OTHER; note = thymine; note = sugar modification: 2'-O-methoxyethylribose
gattctgaattctttcaact

SEQ ID NO: 1424 - RNA, 20 nt, synthetic construct
  source 1..20: mol_type = other RNA; note = Antisense oligonucleotide
  modified_base 1: mod_base = OTHER; note = sugar modification: 2'-O-methoxyethylribose; note = backbone modification: 5'-phosphorothioate
  modified_base 2: mod_base = OTHER; note = backbone modification: 5'-phosphorothioate; note = sugar modification: 2'-O-methoxyethylribose
  modified_base 3: mod_base = OTHER; note = sugar modification: 2'-O-methoxyethylribose; note = thymine; note = backbone modification: 5'-phosphorothioate
  modified_base 4: mod_base = OTHER; note = thymine; note = backbone modification: 5'-phosphorothioate; note = sugar modification: 2'-O-methoxyethylribose
  modified_base 5: mod_base = OTHER; mod_base = m5c; note = backbone modification: 5'-phosphorothioate; note = sugar modification: 2'-O-methoxyethylribose
  modified_base 6: mod_base = OTHER; note = thymine; note = sugar modification: 2'-O-methoxyethylribose; note = backbone modification: 5'-phosphorothioate
  modified_base 7: mod_base = OTHER; note = backbone modification: 5'-phosphorothioate; note = sugar modification: 2'-O-methoxyethylribose
  modified_base 8: mod_base = OTHER; note = sugar modification: 2'-O-methoxyethylribose; note = backbone modification: 5'-phosphorothioate
  modified_base 9: mod_base = OTHER; note = backbone modification: 5'-phosphorothioate; note = sugar modification: 2'-O-methoxyethylribose
  modified_base 10: mod_base = OTHER; note = backbone modification: 5'-phosphorothioate; note = thymine; note = sugar modification: 2'-O-methoxyethylribose
  modified_base 11: mod_base = OTHER; note = sugar modification: 2'-O-methoxyethylribose; note = thymine; note = backbone modification: 5'-phosphorothioate
  modified_base 12: mod_base = m5c; mod_base = OTHER; note = backbone modification: 5'-phosphorothioate; note = sugar modification: 2'-O-methoxyethylribose
  modified_base 13: mod_base = OTHER; note = thymine; note = sugar modification: 2'-O-methoxyethylribose; note = backbone modification: 5'-phosphorothioate
  modified_base 14: mod_base = OTHER; note = sugar modification: 2'-O-methoxyethylribose; note = thymine; note = backbone modification: 5'-phosphorothioate
  modified_base 15: mod_base = OTHER; note = backbone modification: 5'-phosphorothioate; note = sugar modification: 2'-O-methoxyethylribose; note = thymine
  modified_base 16: mod_base = m5c; mod_base = OTHER; note = backbone modification: 5'-phosphorothioate; note = sugar modification: 2'-O-methoxyethylribose
  modified_base 17: mod_base = OTHER; note = backbone modification: 5'-phosphorothioate; note = sugar modification: 2'-O-methoxyethylribose
  modified_base 18: mod_base = OTHER; note = backbone modification: 5'-phosphorothioate; note = sugar modification: 2'-O-methoxyethylribose
  modified_base 19: mod_base = OTHER; mod_base = m5c; note = backbone modification: 5'-phosphorothioate; note = sugar modification: 2'-O-methoxyethylribose
  modified_base 20: mod_base = OTHER; note = sugar modification: lna; note = thymine
gattctgaattctttcaact

SEQ ID NO: 1425 - RNA, 20 nt, synthetic construct
  source 1..20: mol_type = other RNA; note = Antisense oligonucleotide
  modified_base 1: mod_base = OTHER; note = sugar modification: lna; note = backbone modification: 5'-phosphorothioate
  modified_base 2: mod_base = OTHER; note = sugar modification: 2'-O-methoxyethylribose; note = backbone modification: 5'-phosphorothioate
  modified_base 3: mod_base = OTHER; note = sugar modification: 2'-O-methoxyethylribose; note = backbone modification: 5'-phosphorothioate; note = thymine
  modified_base 4: mod_base = OTHER; note = thymine; note = sugar modification: 2'-O-methoxyethylribose; note = backbone modification: 5'-phosphorothioate
  modified_base 5: mod_base = OTHER; mod_base = m5c; note = backbone modification: 5'-phosphorothioate; note = sugar modification: 2'-O-methoxyethylribose
  modified_base 6: mod_base = OTHER; note = thymine; note = backbone modification: 5'-phosphorothioate; note = sugar modification: 2'-O-methoxyethylribose
  modified_base 7: mod_base = OTHER; note = backbone modification: 5'-phosphorothioate; note = sugar modification: 2'-O-methoxyethylribose
  modified_base 8: mod_base = OTHER; note = backbone modification: 5'-phosphorothioate; note = sugar modification: 2'-O-methoxyethylribose
  modified_base 9: mod_base = OTHER; note = sugar modification: 2'-O-methoxyethylribose; note = backbone modification: 5'-phosphorothioate
  modified_base 10: mod_base = OTHER; note = backbone modification: 5'-phosphorothioate; note = sugar modification: 2'-O-methoxyethylribose; note = thymine
  modified_base 11: mod_base = OTHER; note = backbone modification: 5'-phosphorothioate; note = sugar modification: 2'-O-methoxyethylribose; note = thymine
  modified_base 12: mod_base = OTHER; mod_base = m5c; note = backbone modification: 5'-phosphorothioate; note = sugar modification: 2'-O-methoxyethylribose
  modified_base 13: mod_base = OTHER; note = backbone modification: 5'-phosphorothioate; note = sugar modification: 2'-O-methoxyethylribose; note = thymine
  modified_base 14: mod_base = OTHER; note = backbone modification: 5'-phosphorothioate; note = thymine; note = sugar modification: 2'-O-methoxyethylribose
  modified_base 15: mod_base = OTHER; note = sugar modification: 2'-O-methoxyethylribose; note = thymine; note = backbone modification: 5'-phosphorothioate
  modified_base 16: mod_base = m5c; mod_base = OTHER; note = sugar modification: 2'-O-methoxyethylribose; note = backbone modification: 5'-phosphorothioate
  modified_base 17: mod_base = OTHER; note = sugar modification: 2'-O-methoxyethylribose; note = backbone modification: 5'-phosphorothioate
  modified_base 18: mod_base = OTHER; note = sugar modification: 2'-O-methoxyethylribose; note = backbone modification: 5'-phosphorothioate
  modified_base 19: mod_base = m5c; mod_base = OTHER; note = backbone modification: 5'-phosphorothioate; note = sugar modification: 2'-O-methoxyethylribose
  modified_base 20: mod_base = OTHER; note = thymine; note = sugar modification: lna
gattctgaattctttcaact

SEQ ID NO: 1426 - RNA, 20 nt, synthetic construct
  source 1..20: mol_type = other RNA; note = Antisense oligonucleotide
  modified_base 1: mod_base = OTHER; note = backbone modification: 5'-phosphorothioate; note = sugar modification: lna
  modified_base 2: mod_base = OTHER; note = backbone modification: 5'-phosphorothioate; note = sugar modification: lna
  modified_base 3: mod_base = OTHER; note = backbone modification: 5'-phosphorothioate; note = sugar modification: 2'-O-methoxyethylribose; note = thymine
  modified_base 4: mod_base = OTHER; note = thymine; note = backbone modification: 5'-phosphorothioate; note = sugar modification: 2'-O-methoxyethylribose
  modified_base 5: mod_base = OTHER; mod_base = m5c; note = sugar modification: 2'-O-methoxyethylribose; note = backbone modification: 5'-phosphorothioate
  modified_base 6: mod_base = OTHER; note = thymine; note = sugar modification: 2'-O-methoxyethylribose; note = backbone modification: 5'-phosphorothioate
  modified_base 7: mod_base = OTHER; note = sugar modification: 2'-O-methoxyethylribose; note = backbone modification: 5'-phosphorothioate
  modified_base 8: mod_base = OTHER; note = backbone modification: 5'-phosphorothioate; note = sugar modification: 2'-O-methoxyethylribose
  modified_base 9: mod_base = OTHER; note = backbone modification: 5'-phosphorothioate; note = sugar modification: 2'-O-methoxyethylribose
  modified_base 10: mod_base = OTHER; note = backbone modification: 5'-phosphorothioate; note = thymine; note = sugar modification: 2'-O-methoxyethylribose
  modified_base 11: mod_base = OTHER; note = backbone modification: 5'-phosphorothioate; note = sugar modification: 2'-O-methoxyethylribose; note = thymine
  modified_base 12: mod_base = m5c; mod_base = OTHER; note = sugar modification: 2'-O-methoxyethylribose; note = backbone modification: 5'-phosphorothioate
  modified_base 13: mod_base = OTHER; note = thymine; note = backbone modification: 5'-phosphorothioate; note = sugar modification: 2'-O-methoxyethylribose
  modified_base 14: mod_base = OTHER; note = thymine; note = sugar modification: 2'-O-methoxyethylribose; note = backbone modification: 5'-phosphorothioate
  modified_base 15: mod_base = OTHER; note = thymine; note = backbone modification: 5'-phosphorothioate; note = sugar modification: 2'-O-methoxyethylribose
  modified_base 16: mod_base = OTHER; mod_base = m5c; note = sugar modification: 2'-O-methoxyethylribose; note = backbone modification: 5'-phosphorothioate
  modified_base 17: mod_base = OTHER; note = sugar modification: 2'-O-methoxyethylribose; note = backbone modification: 5'-phosphorothioate
  modified_base 18: mod_base = OTHER; note = sugar modification: 2'-O-methoxyethylribose; note = backbone modification: 5'-phosphorothioate
  modified_base 19: mod_base = m5c; mod_base = OTHER; note = sugar modification: 2'-O-methoxyethylribose; note = backbone modification: 5'-phosphorothioate
  modified_base 20: mod_base = OTHER; note = thymine; note = sugar modification: 2'-O-methoxyethylribose
gattctgaattctttcaact

SEQ ID NO: 1427 - RNA, 20 nt, synthetic construct
  source 1..20: mol_type = other RNA; note = Antisense oligonucleotide
  modified_base 1: mod_base = OTHER; note = backbone modification: 5'-phosphorothioate; note = sugar modification: 2'-O-methoxyethylribose
  modified_base 2: mod_base = OTHER; note = backbone modification: 5'-phosphorothioate; note = sugar modification: 2'-O-methoxyethylribose
  modified_base 3: mod_base = OTHER; note = backbone modification: 5'-phosphorothioate; note = thymine; note = sugar modification: 2'-O-methoxyethylribose
  modified_base 4: mod_base = OTHER; note = sugar modification: 2'-O-methoxyethylribose; note = thymine; note = backbone modification: 5'-phosphorothioate
  modified_base 5: mod_base = m5c; mod_base = OTHER; note = backbone modification: 5'-phosphorothioate; note = sugar modification: 2'-O-methoxyethylribose
  modified_base 6: mod_base = OTHER; note = thymine; note = backbone modification: 5'-phosphorothioate; note = sugar modification: 2'-O-methoxyethylribose
  modified_base 7: mod_base = OTHER; note = backbone modification: 5'-phosphorothioate; note = sugar modification: 2'-O-methoxyethylribose
  modified_base 8: mod_base = OTHER; note = sugar modification: 2'-O-methoxyethylribose; note = backbone modification: 5'-phosphorothioate
  modified_base 9: mod_base = OTHER; note = sugar modification: 2'-O-methoxyethylribose; note = backbone modification: 5'-phosphorothioate
  modified_base 10: mod_base = OTHER; note = sugar modification: 2'-O-methoxyethylribose; note = backbone modification: 5'-phosphorothioate; note = thymine
  modified_base 11: mod_base = OTHER; note = backbone modification: 5'-phosphorothioate; note = thymine; note = sugar modification: 2'-O-methoxyethylribose
  modified_base 12: mod_base = OTHER; mod_base = m5c; note = backbone modification: 5'-phosphorothioate; note = sugar modification: 2'-O-methoxyethylribose
  modified_base 13: mod_base = OTHER; note = backbone modification: 5'-phosphorothioate; note = thymine; note = sugar modification: 2'-O-methoxyethylribose
  modified_base 14: mod_base = OTHER; note = thymine; note = sugar modification: 2'-O-methoxyethylribose; note = backbone modification: 5'-phosphorothioate
  modified_base 15: mod_base = OTHER; note = thymine; note = sugar modification: 2'-O-methoxyethylribose; note = backbone modification: 5'-phosphorothioate
  modified_base 16: mod_base = m5c; mod_base = OTHER; note = backbone modification: 5'-phosphorothioate; note = sugar modification: 2'-O-methoxyethylribose
  modified_base 17: mod_base = OTHER; note = backbone modification: 5'-phosphorothioate; note = sugar modification: 2'-O-methoxyethylribose
  modified_base 18: mod_base = OTHER; note = backbone modification: 5'-phosphorothioate; note = sugar modification: 2'-O-methoxyethylribose
  modified_base 19: mod_base = m5c; mod_base = OTHER; note = sugar modification: lna; note = backbone modification: 5'-phosphorothioate
  modified_base 20: mod_base = OTHER; note = sugar modification: lna; note = thymine
gattctgaattctttcaact

SEQ ID NO: 1428 - RNA, 20 nt, synthetic construct
  source 1..20: mol_type = other RNA; note = Antisense oligonucleotide
  modified_base 1: mod_base = OTHER; note = sugar modification: lna; note = backbone modification: 5'-phosphorothioate
  modified_base 2: mod_base = OTHER; note = sugar modification: lna; note = backbone modification: 5'-phosphorothioate
  modified_base 3: mod_base = OTHER; note = thymine; note = sugar modification: 2'-O-methoxyethylribose; note = backbone modification: 5'-phosphorothioate
  modified_base 4: mod_base = OTHER; note = sugar modification: 2'-O-methoxyethylribose; note = backbone modification: 5'-phosphorothioate; note = thymine
  modified_base 5: mod_base = m5c; mod_base = OTHER; note = sugar modification: 2'-O-methoxyethylribose; note = backbone modification: 5'-phosphorothioate
  modified_base 6: mod_base = OTHER; note = thymine; note = sugar modification: 2'-O-methoxyethylribose; note = backbone modification: 5'-phosphorothioate
  modified_base 7: mod_base = OTHER; note = sugar modification: 2'-O-methoxyethylribose; note = backbone modification: 5'-phosphorothioate
  modified_base 8: mod_base = OTHER; note = backbone modification: 5'-phosphorothioate; note = sugar modification: 2'-O-methoxyethylribose
  modified_base 9: mod_base = OTHER; note = backbone modification: 5'-phosphorothioate; note = sugar modification: 2'-O-methoxyethylribose
  modified_base 10: mod_base = OTHER; note = sugar modification: 2'-O-methoxyethylribose; note = thymine; note = backbone modification: 5'-phosphorothioate
  modified_base 11: mod_base = OTHER; note = sugar modification: 2'-O-methoxyethylribose; note = thymine; note = backbone modification: 5'-phosphorothioate
  modified_base 12: mod_base = m5c; mod_base = OTHER; note = backbone modification: 5'-phosphorothioate; note = sugar modification: 2'-O-methoxyethylribose
  modified_base 13: mod_base = OTHER; note = sugar modification: 2'-O-methoxyethylribose; note = thymine; note = backbone modification: 5'-phosphorothioate
  modified_base 14: mod_base = OTHER; note = sugar modification: 2'-O-methoxyethylribose; note = backbone modification: 5'-phosphorothioate; note = thymine
  modified_base 15: mod_base = OTHER; note = thymine; note = backbone modification: 5'-phosphorothioate; note = sugar modification: 2'-O-methoxyethylribose
  modified_base 16: mod_base = m5c; mod_base = OTHER; note = backbone modification: 5'-phosphorothioate; note = sugar modification: 2'-O-methoxyethylribose
  modified_base 17: mod_base = OTHER; note = sugar modification: 2'-O-methoxyethylribose; note = backbone modification: 5'-phosphorothioate
  modified_base 18: mod_base = OTHER; note = sugar modification: 2'-O-methoxyethylribose; note = backbone modification: 5'-phosphorothioate
  modified_base 19: mod_base = m5c; mod_base = OTHER; note = backbone modification: 5'-phosphorothioate; note = sugar modification: lna
  modified_base 20: mod_base = OTHER; note = sugar modification: lna; note = thymine
gattctgaattctttcaact

SEQ ID NO: 1429 - RNA, 20 nt, synthetic construct
  source 1..20: mol_type = other RNA; note = Antisense oligonucleotide
  modified_base 1: mod_base = OTHER; note = backbone modification: 5'-phosphorothioate; note = sugar modification: lna
  modified_base 2: mod_base = OTHER; note = backbone modification: 5'-phosphorothioate; note = sugar modification: 2'-O-methoxyethylribose
  modified_base 3: mod_base = OTHER; note = backbone modification: 5'-phosphorothioate; note = sugar modification: 2'-O-methoxyethylribose; note = thymine
  modified_base 4: mod_base = OTHER; note = sugar modification: 2'-O-methoxyethylribose; note = backbone modification: 5'-phosphorothioate; note = thymine
  modified_base 5: mod_base = m5c; mod_base = OTHER; note = backbone modification: 5'-phosphorothioate; note = sugar modification: 2'-O-methoxyethylribose
  modified_base 6: mod_base = OTHER; note = thymine; note = sugar modification: 2'-O-methoxyethylribose; note = backbone modification: 5'-phosphorothioate
  modified_base 7: mod_base = OTHER; note = sugar modification: 2'-O-methoxyethylribose; note = backbone modification: 5'-phosphorothioate
  modified_base 8: mod_base = OTHER; note = backbone modification: 5'-phosphorothioate; note = sugar modification: 2'-O-methoxyethylribose
  modified_base 9: mod_base = OTHER; note = sugar modification: 2'-O-methoxyethylribose; note = backbone modification: 5'-phosphorothioate
  modified_base 10: mod_base = OTHER; note = sugar modification: 2'-O-methoxyethylribose; note = thymine; note = backbone modification: 5'-phosphorothioate
  modified_base 11: mod_base = OTHER; note = backbone modification: 5'-phosphorothioate; note = sugar modification: 2'-O-methoxyethylribose; note = thymine
  modified_base 12: mod_base = m5c; mod_base = OTHER; note = sugar modification: 2'-O-methoxyethylribose; note = backbone modification: 5'-phosphorothioate
  modified_base 13: mod_base = OTHER; note = thymine; note = sugar modification: 2'-O-methoxyethylribose; note = backbone modification: 5'-phosphorothioate
  modified_base 14: mod_base = OTHER; note = backbone modification: 5'-phosphorothioate; note = sugar modification: 2'-O-methoxyethylribose; note = thymine
  modified_base 15: mod_base = OTHER; note = sugar modification: 2'-O-methoxyethylribose; note = backbone modification: 5'-phosphorothioate; note = thymine
  modified_base 16: mod_base = OTHER; mod_base = m5c; note = backbone modification: 5'-phosphorothioate; note = sugar modification: 2'-O-methoxyethylribose
  modified_base 17: mod_base = OTHER; note = sugar modification: 2'-O-methoxyethylribose; note = backbone modification: 5'-phosphorothioate
  modified_base 18: mod_base = OTHER; note = backbone modification: 5'-phosphorothioate; note = sugar modification: 2'-O-methoxyethylribose
  modified_base 19: mod_base = m5c; mod_base = OTHER; note = backbone modification: 5'-phosphorothioate; note = sugar modification: lna
  modified_base 20: mod_base = OTHER; note = sugar modification: lna; note = thymine
gattctgaattctttcaact

SEQ ID NO: 1430 - RNA, 20 nt, synthetic construct
  source 1..20: mol_type = other RNA; note = Antisense oligonucleotide
  modified_base 1: mod_base = OTHER; note = backbone modification: 5'-phosphorothioate; note = sugar modification: lna
  modified_base 2: mod_base = OTHER; note = backbone modification: 5'-phosphorothioate; note = sugar modification: lna
  modified_base 3: mod_base = OTHER; note = backbone modification: 5'-phosphorothioate; note = sugar modification: 2'-O-methoxyethylribose; note = thymine
  modified_base 4: mod_base = OTHER; note = sugar modification: 2'-O-methoxyethylribose; note = thymine; note = backbone modification: 5'-phosphorothioate
  modified_base 5: mod_base = OTHER; mod_base = m5c; note = backbone modification: 5'-phosphorothioate; note = sugar modification: 2'-O-methoxyethylribose
  modified_base 6: mod_base = OTHER; note = backbone modification: 5'-phosphorothioate; note = thymine; note = sugar modification: 2'-O-methoxyethylribose
  modified_base 7: mod_base = OTHER; note = sugar modification: 2'-O-methoxyethylribose; note = backbone modification: 5'-phosphorothioate
  modified_base 8: mod_base = OTHER; note = backbone modification: 5'-phosphorothioate; note = sugar modification: 2'-O-methoxyethylribose
  modified_base 9: mod_base = OTHER; note = backbone modification: 5'-phosphorothioate; note = sugar modification: 2'-O-methoxyethylribose
  modified_base 10: mod_base = OTHER; note = thymine; note = backbone modification: 5'-phosphorothioate; note = sugar modification: 2'-O-methoxyethylribose
  modified_base 11: mod_base = OTHER; note = thymine; note = backbone modification: 5'-phosphorothioate; note = sugar modification: 2'-O-methoxyethylribose
  modified_base 12: mod_base = m5c; mod_base = OTHER; note = backbone modification: 5'-phosphorothioate; note = sugar modification: 2'-O-methoxyethylribose
  modified_base 13: mod_base = OTHER; note = thymine; note = sugar modification: 2'-O-methoxyethylribose; note = backbone modification: 5'-phosphorothioate
  modified_base 14: mod_base = OTHER; note = thymine; note = sugar modification: 2'-O-methoxyethylribose; note = backbone modification: 5'-phosphorothioate
  modified_base 15: mod_base = OTHER; note = sugar modification: 2'-O-methoxyethylribose; note = thymine; note = backbone modification: 5'-phosphorothioate
  modified_base 16: mod_base = m5c; mod_base = OTHER; note = sugar modification: 2'-O-methoxyethylribose; note = backbone modification: 5'-phosphorothioate
  modified_base 17: mod_base = OTHER; note = backbone modification: 5'-phosphorothioate; note = sugar modification: 2'-O-methoxyethylribose
  modified_base 18: mod_base = OTHER; note = sugar modification: 2'-O-methoxyethylribose; note = backbone modification: 5'-phosphorothioate
  modified_base 19: mod_base = OTHER; mod_base = m5c; note = backbone modification: 5'-phosphorothioate; note = sugar modification: 2'-O-methoxyethylribose
  modified_base 20: mod_base = OTHER; note = thymine; note = sugar modification: lna
gattctgaattctttcaact

SEQ ID NO: 1431 - RNA, 18 nt, synthetic construct
  source 1..18: mol_type = other RNA; note = Antisense oligonucleotide
  modified_base 1: mod_base = OTHER; note = sugar modification: lna; note = backbone modification: 5'-phosphorothioate; note = thymine
  modified_base 2: mod_base = OTHER; note = sugar modification: 2'-O-methoxyethylribose; note = backbone modification: 5'-phosphorothioate; note = thymine
  modified_base 3: mod_base = OTHER; mod_base = m5c; note = sugar modification: 2'-O-methoxyethylribose; note = backbone modification: 5'-phosphorothioate
  modified_base 4: mod_base = OTHER; note = backbone modification: 5'-phosphorothioate; note = thymine; note = sugar modification: 2'-O-methoxyethylribose
  modified_base 5: mod_base = OTHER; note = sugar modification: 2'-O-methoxyethylribose; note = backbone modification: 5'-phosphorothioate
  modified_base 6: mod_base = OTHER; note = backbone modification: 5'-phosphorothioate; note = sugar modification: 2'-O-methoxyethylribose
  modified_base 7: mod_base = OTHER; note = sugar modification: 2'-O-methoxyethylribose; note = backbone modification: 5'-phosphorothioate
  modified_base 8: mod_base = OTHER; note = backbone modification: 5'-phosphorothioate; note = thymine; note = sugar modification: 2'-O-methoxyethylribose
  modified_base 9: mod_base = OTHER; note = backbone modification: 5'-phosphorothioate; note = thymine; note = sugar modification: 2'-O-methoxyethylribose
  modified_base 10: mod_base = OTHER; mod_base = m5c; note = sugar modification: 2'-O-methoxyethylribose; note = backbone modification: 5'-phosphorothioate
  modified_base 11: mod_base = OTHER; note = thymine; note = backbone modification: 5'-phosphorothioate; note = sugar modification: 2'-O-methoxyethylribose
  modified_base 12: mod_base = OTHER; note = backbone modification: 5'-phosphorothioate; note = sugar modification: 2'-O-methoxyethylribose; note = thymine
  modified_base 13: mod_base = OTHER; note = thymine; note = backbone modification: 5'-phosphorothioate; note = sugar modification: 2'-O-methoxyethylribose
  modified_base 14: mod_base = OTHER; mod_base = m5c; note = backbone modification: 5'-phosphorothioate; note = sugar modification: 2'-O-methoxyethylribose
  modified_base 15: mod_base = OTHER; note = backbone modification: 5'-phosphorothioate; note = sugar modification: 2'-O-methoxyethylribose
  modified_base 16: mod_base = OTHER; note = backbone modification: 5'-phosphorothioate; note = sugar modification: 2'-O-methoxyethylribose
  modified_base 17: mod_base = m5c; mod_base = OTHER; note = backbone modification: 5'-phosphorothioate; note = sugar modification: 2'-O-methoxyethylribose
  modified_base 18: mod_base = OTHER; note = sugar modification: 2'-O-methoxyethylribose; note = thymine
ttctgaattctttcaact

SEQ ID NO: 1432 - RNA, 18 nt, synthetic construct
  source 1..18: mol_type = other RNA; note = Antisense oligonucleotide
  modified_base 1: mod_base = OTHER; note = backbone modification: 5'-phosphorothioate; note = thymine; note = sugar modification: 2'-O-methoxyethylribose
  modified_base 2: mod_base = OTHER; note = sugar modification: 2'-O-methoxyethylribose; note = thymine; note = backbone modification: 5'-phosphorothioate
  modified_base 3: mod_base = OTHER; mod_base = m5c; note = sugar modification: 2'-O-methoxyethylribose; note = backbone modification: 5'-phosphorothioate
  modified_base 4: mod_base = OTHER; note = backbone modification: 5'-phosphorothioate; note = sugar modification: 2'-O-methoxyethylribose; note = thymine
  modified_base 5: mod_base = OTHER; note = backbone modification: 5'-phosphorothioate; note = sugar modification: 2'-O-methoxyethylribose
  modified_base 6: mod_base = OTHER; note = backbone modification: 5'-phosphorothioate; note = sugar modification: 2'-O-methoxyethylribose
  modified_base 7: mod_base = OTHER; note = backbone modification: 5'-phosphorothioate; note = sugar modification: 2'-O-methoxyethylribose
  modified_base 8: mod_base = OTHER; note = backbone modification: 5'-phosphorothioate; note = thymine; note = sugar modification: 2'-O-methoxyethylribose
  modified_base 9: mod_base = OTHER; note = backbone modification: 5'-phosphorothioate; note = sugar modification: 2'-O-methoxyethylribose; note = thymine
  modified_base 10: mod_base = m5c; mod_base = OTHER; note = sugar modification: 2'-O-methoxyethylribose; note = backbone modification: 5'-phosphorothioate
  modified_base 11: mod_base = OTHER; note = thymine; note = sugar modification: 2'-O-methoxyethylribose; note = backbone modification: 5'-phosphorothioate
  modified_base 12: mod_base = OTHER; note = thymine; note = sugar modification: 2'-O-methoxyethylribose; note = backbone modification: 5'-phosphorothioate
  modified_base 13: mod_base = OTHER; note = backbone modification: 5'-phosphorothioate; note = thymine; note = sugar modification: 2'-O-methoxyethylribose
  modified_base 14: mod_base = m5c; mod_base = OTHER; note = backbone modification: 5'-phosphorothioate; note = sugar modification: 2'-O-methoxyethylribose
  modified_base 15: mod_base = OTHER; note = backbone modification: 5'-phosphorothioate; note = sugar modification: 2'-O-methoxyethylribose
  modified_base 16: mod_base = OTHER; note = sugar modification: 2'-O-methoxyethylribose; note = backbone modification: 5'-phosphorothioate
  modified_base 17: mod_base = m5c; mod_base = OTHER; note = sugar modification: 2'-O-methoxyethylribose; note = backbone modification: 5'-phosphorothioate
  modified_base 18: mod_base = OTHER; note = thymine; note = sugar modification: lna
ttctgaattctttcaact

SEQ ID NO: 1433 - RNA, 18 nt, synthetic construct
  source 1..18: mol_type = other RNA; note = Antisense oligonucleotide
  modified_base 1: mod_base = OTHER; note = sugar modification: lna; note = backbone modification: 5'-phosphorothioate; note = thymine
  modified_base 2: mod_base = OTHER; note = sugar modification: lna; note = thymine; note = backbone modification: 5'-phosphorothioate
  modified_base 3: mod_base = OTHER; mod_base = m5c; note = sugar modification: 2'-O-methoxyethylribose; note = backbone modification: 5'-phosphorothioate
  modified_base 4: mod_base = OTHER; note = sugar modification: 2'-O-methoxyethylribose; note = backbone modification: 5'-phosphorothioate; note = thymine
  modified_base 5: mod_base = OTHER; note = sugar modification: 2'-O-methoxyethylribose; note = backbone modification: 5'-phosphorothioate
  modified_base 6: mod_base = OTHER; note = backbone modification: 5'-phosphorothioate; note = sugar modification: 2'-O-methoxyethylribose
  modified_base 7: mod_base = OTHER; note = backbone modification: 5'-phosphorothioate; note = sugar modification: 2'-O-methoxyethylribose
  modified_base 8: mod_base = OTHER; note = thymine; note = sugar modification: 2'-O-methoxyethylribose; note = backbone modification: 5'-phosphorothioate
  modified_base 9: mod_base = OTHER; note = sugar modification: 2'-O-methoxyethylribose; note = thymine; note = backbone modification: 5'-phosphorothioate
  modified_base 10: mod_base = m5c; mod_base = OTHER; note = sugar modification: 2'-O-methoxyethylribose; note = backbone modification: 5'-phosphorothioate
  modified_base 11: mod_base = OTHER; note = backbone modification: 5'-phosphorothioate; note = thymine; note = sugar modification: 2'-O-methoxyethylribose
  modified_base 12: mod_base = OTHER; note = backbone modification: 5'-phosphorothioate; note = thymine; note = sugar modification: 2'-O-methoxyethylribose
  modified_base 13: mod_base = OTHER; note = thymine; note = backbone modification: 5'-phosphorothioate; note = sugar modification: 2'-O-methoxyethylribose
  modified_base 14: mod_base = m5c; mod_base = OTHER; note = sugar modification: 2'-O-methoxyethylribose; note = backbone modification: 5'-phosphorothioate
  modified_base 15: mod_base = OTHER; note = backbone modification: 5'-phosphorothioate; note = sugar modification: 2'-O-methoxyethylribose
  modified_base 16: mod_base = OTHER; note = backbone modification: 5'-phosphorothioate; note = sugar modification: 2'-O-methoxyethylribose
  modified_base 17: mod_base = OTHER; mod_base = m5c; note = sugar modification: 2'-O-methoxyethylribose; note = backbone modification: 5'-phosphorothioate
  modified_base 18: mod_base = OTHER; note = sugar modification: 2'-O-methoxyethylribose; note = thymine
ttctgaattctttcaact

SEQ ID NO: 1434 - RNA, 18 nt, synthetic construct
  source 1..18: mol_type = other RNA; note = Antisense oligonucleotide
  modified_base 1: mod_base = OTHER; note = sugar modification: 2'-O-methoxyethylribose; note = backbone modification: 5'-phosphorothioate; note = thymine
  modified_base 2: mod_base = OTHER; note = backbone modification: 5'-phosphorothioate; note = thymine; note = sugar modification: 2'-O-methoxyethylribose
  modified_base 3: mod_base = OTHER; mod_base = m5c; note = backbone modification: 5'-phosphorothioate; note = sugar modification: 2'-O-methoxyethylribose
  modified_base 4: mod_base = OTHER; note = thymine; note = backbone modification: 5'-phosphorothioate; note = sugar modification: 2'-O-methoxyethylribose
  modified_base 5: mod_base = OTHER; note = sugar modification: 2'-O-methoxyethylribose; note = backbone modification: 5'-phosphorothioate
  modified_base 6: mod_base = OTHER; note = backbone modification: 5'-phosphorothioate; note = sugar modification: 2'-O-methoxyethylribose
  modified_base 7: mod_base = OTHER; note = backbone modification: 5'-phosphorothioate; note = sugar modification: 2'-O-methoxyethylribose
  modified_base 8: mod_base = OTHER; note = sugar modification: 2'-O-methoxyethylribose; note = thymine; note = backbone modification: 5'-phosphorothioate
  modified_base 9: mod_base = OTHER; note = thymine; note = backbone modification: 5'-phosphorothioate; note = sugar modification: 2'-O-methoxyethylribose
  modified_base 10: mod_base = OTHER; mod_base = m5c; note = sugar modification: 2'-O-methoxyethylribose; note = backbone modification: 5'-phosphorothioate
  modified_base 11: mod_base = OTHER; note = thymine; note = sugar modification: 2'-O-methoxyethylribose; note = backbone modification: 5'-phosphorothioate
  modified_base 12: mod_base = OTHER; note = backbone modification: 5'-phosphorothioate; note = sugar modification: 2'-O-methoxyethylribose; note = thymine
  modified_base 13: mod_base = OTHER; note = sugar modification: 2'-O-methoxyethylribose; note = backbone modification: 5'-phosphorothioate; note = thymine
  modified_base 14: mod_base = m5c; mod_base = OTHER; note = sugar modification: 2'-O-methoxyethylribose; note = backbone modification: 5'-phosphorothioate
  modified_base 15: mod_base = OTHER; note = sugar modification: 2'-O-methoxyethylribose; note = backbone modification: 5'-phosphorothioate
  modified_base 16: mod_base = OTHER; note = sugar modification: 2'-O-methoxyethylribose; note = backbone modification: 5'-phosphorothioate
  modified_base 17: mod_base = m5c; mod_base = OTHER; note = backbone modification: 5'-phosphorothioate; note = sugar modification: lna
  modified_base 18: mod_base = OTHER; note = sugar modification: lna; note = thymine
ttctgaattctttcaact

SEQ ID NO: 1435 - RNA, 18 nt, synthetic construct
  source 1..18: mol_type = other RNA; note = Antisense oligonucleotide
  modified_base 1: mod_base = OTHER; note = sugar modification: lna; note = thymine; note = backbone modification: 5'-phosphorothioate
  modified_base 2: mod_base = OTHER; note = sugar modification: 2'-O-methoxyethylribose; note = backbone modification: 5'-phosphorothioate; note = thymine
  modified_base 3: mod_base = OTHER; mod_base = m5c; note = backbone modification: 5'-phosphorothioate; note = sugar modification: 2'-O-methoxyethylribose
  modified_base 4: mod_base = OTHER; note = backbone modification: 5'-phosphorothioate; note = sugar modification: 2'-O-methoxyethylribose; note = thymine
  modified_base 5: mod_base = OTHER; note = backbone modification: 5'-phosphorothioate; note = sugar modification: 2'-O-methoxyethylribose
  modified_base 6: mod_base = OTHER; note = sugar modification: 2'-O-methoxyethylribose; note = backbone modification: 5'-phosphorothioate
  modified_base 7: mod_base = OTHER; note = backbone modification: 5'-phosphorothioate; note = sugar modification: 2'-O-methoxyethylribose
  modified_base 8: mod_base = OTHER; note = backbone modification: 5'-phosphorothioate; note = sugar modification: 2'-O-methoxyethylribose; note = thymine
  modified_base 9: mod_base = OTHER; note = backbone modification: 5'-phosphorothioate; note = thymine; note = sugar modification: 2'-O-methoxyethylribose
  modified_base 10: mod_base = OTHER; mod_base = m5c; note = sugar modification: 2'-O-methoxyethylribose; note = backbone modification: 5'-phosphorothioate
  modified_base 11: mod_base = OTHER; note = backbone modification: 5'-phosphorothioate; note = sugar modification: 2'-O-methoxyethylribose; note = thymine
  modified_base 12: mod_base = OTHER; note = thymine; note = backbone modification: 5'-phosphorothioate; note = sugar modification: 2'-O-methoxyethylribose
  modified_base 13: mod_base = OTHER; note = thymine; note = sugar modification: 2'-O-methoxyethylribose; note = backbone modification: 5'-phosphorothioate
  modified_base 14: mod_base = m5c; mod_base = OTHER; note = backbone modification: 5'-phosphorothioate; note = sugar modification: 2'-O-methoxyethylribose
  modified_base 15: mod_base = OTHER; note = sugar modification: 2'-O-methoxyethylribose; note = backbone modification: 5'-phosphorothioate
  modified_base 16: mod_base = OTHER; note = backbone modification: 5'-phosphorothioate; note = sugar modification: 2'-O-methoxyethylribose
  modified_base 17: mod_base = OTHER; mod_base = m5c; note = backbone modification: 5'-phosphorothioate; note = sugar modification: lna
  modified_base 18: mod_base = OTHER; note = sugar modification: lna; note = thymine
ttctgaattctttcaact

SEQ ID NO: 1436 - RNA, 18 nt, synthetic construct
  source 1..18: mol_type = other RNA; note = Antisense oligonucleotide
  modified_base 1: mod_base = OTHER; note = thymine; note = sugar modification: lna; note = backbone modification: 5'-phosphorothioate
  modified_base 2: mod_base = OTHER; note = thymine; note = backbone modification: 5'-phosphorothioate; note = sugar modification: lna
  modified_base 3: mod_base = OTHER; mod_base = m5c; note = backbone modification: 5'-phosphorothioate; note = sugar modification: 2'-O-methoxyethylribose
  modified_base 4: mod_base = OTHER; note = backbone modification: 5'-phosphorothioate; note = thymine; note = sugar modification: 2'-O-methoxyethylribose
  modified_base 5: mod_base = OTHER; note = sugar modification: 2'-O-methoxyethylribose; note = backbone modification: 5'-phosphorothioate
  modified_base 6: mod_base = OTHER; note = sugar modification: 2'-O-methoxyethylribose; note = backbone modification: 5'-phosphorothioate
  modified_base 7: mod_base = OTHER; note = sugar modification: 2'-O-methoxyethylribose; note = backbone modification: 5'-phosphorothioate
  modified_base 8: mod_base = OTHER; note = sugar modification: 2'-O-methoxyethylribose; note = backbone modification: 5'-phosphorothioate; note = thymine
  modified_base 9: mod_base = OTHER; note = backbone modification: 5'-phosphorothioate; note = thymine; note = sugar modification: 2'-O-methoxyethylribose
  modified_base 10: mod_base = OTHER; mod_base = m5c; note = backbone modification: 5'-phosphorothioate; note = sugar modification: 2'-O-methoxyethylribose
  modified_base 11: mod_base = OTHER; note = thymine; note = sugar modification: 2'-O-methoxyethylribose; note = backbone modification: 5'-phosphorothioate
  modified_base 12: mod_base = OTHER; note = thymine; note = backbone modification: 5'-phosphorothioate; note = sugar modification: 2'-O-methoxyethylribose
  modified_base 13: mod_base = OTHER; note = sugar modification: 2'-O-methoxyethylribose; note = backbone modification: 5'-phosphorothioate; note = thymine
  modified_base 14: mod_base = m5c; mod_base = OTHER; note = backbone modification: 5'-phosphorothioate; note = sugar modification: 2'-O-methoxyethylribose
  modified_base 15: mod_base = OTHER; note = sugar modification: 2'-O-methoxyethylribose; note = backbone modification: 5'-phosphorothioate
  modified_base 16: mod_base = OTHER; note = sugar modification: 2'-O-methoxyethylribose; note = backbone modification: 5'-phosphorothioate
  modified_base 17: mod_base = OTHER; mod_base = m5c; note = sugar modification: 2'-O-methoxyethylribose; note = backbone modification: 5'-phosphorothioate
  modified_base 18: mod_base = OTHER; note = thymine; note = sugar modification: lna
ttctgaattctttcaact

SEQ ID NO: 1437 - DNA, 19 bp, synthetic construct
  source 1..19: mol_type = other DNA
ggtgggtgaccttgaggat

SEQ ID NO: 1438 - DNA, 24 bp, synthetic construct
  source 1..24: mol_type = other DNA
atcatcaagcagaagcagttggcc

SEQ ID NO: 1439 - DNA, 22 bp, synthetic construct
  source 1..22: mol_type = other DNA
gccaagtcatttgccacatcta

What is claimed is:

1. An ASO comprising or consisting of the sequence of any one of SEQ ID NO:1-1436 which contains at least one modification.

2. The ASO of claim 1 wherein all nucleotides are RNA.

3. The ASO of claim 1, wherein the chemical modification of the sugar moiety is 2′-MOE, 2′-OMe, 2′-F and/or LNA.

4. The ASO of claim 1, wherein the modification is a chemical modification of the sugar moiety of all nucleotides in the ASO.

5. The ASO of claim 3, wherein the chemical modification of the sugar moiety of all nucleotides in the ASO is 2′-MOE.

6. The ASO of claim 1, wherein the chemical modification of the sugar moiety is 1, 2, 3 or 4 LNAs, and the remaining nucleotides are 2′-MOE.

7. The ASO of claim 1, wherein the chemical modification of the sugar moiety of the two 5′ terminal nucleotide positions of the ASO and the two 3′ terminal nucleotide positions of the ASO are all LNA, and the remaining nucleotides are 2′-MOE.

8. The ASO of claim 1, wherein the chemical modification of the sugar moiety of one or more nucleotides in the ASO is a morpholine (PMO, PPMO, PMO-X), a peptide derivative (PNA), a boron-cluster modified PNA, a pyrrolidine-based oxy-peptide nucleic acid (POPNA), a glycol- or glycerol-based nucleic acid (GNA), a threose-based nucleic acid (TNA), an acyclic threoninol-based nucleic acid (aTNA), a cationic morpholino-based oligomer (PMOPlus), an oligonucleotide with integrated bases and backbones (ONIBs), a pyrrolidine-amide oligonucleotides (POMs); or a derivative thereof.

9. The ASO of claim 1, wherein the modification is a chemical modification of the base moiety of 1, 2, 3, 4 or all nucleotides in the ASO.

10. The ASO of claim 1, wherein all cytosine bases are replaced with 5-methylcytosine.

11. The ASO of claim 1, wherein all thymine bases are replaced with uracil.

12. The ASO of claim 1, wherein the backbone is a fully phosphorothioate backbone linkage.

13. The ASO of claim 1, wherein the ASO comprises a hydroxyalkoxy group at the 5′ terminus of the ASO, the 3′ terminus of the ASO, or at both the 5′ and 3′ ends of the ASO.

14. The ASO of claim 1, wherein the ASO comprises a modified hydroxyalkoxy group at the 5′ terminus of the ASO, the 3′ terminus of the ASO, or at both the 5′ and 3′ ends of the ASO.

15. The ASO of claim 14, wherein the hydroxyalkoxy group comprises or consists of an ethylene glycol monomer, ethylene glycol oligomer or ethylene glycol polymer (also known as polyethylene glycol, PEG).

16. The ASO of claim 14, wherein the hydroxyalkoxy group is a TEG or a HEG.

17. The ASO of claim 1, wherein one or two nucleotides are omitted from the 5′ terminus of the ASO, or where one or two nucleotides are omitted from the 3′ terminus of the ASO, or where one nucleotide is omitted from the 5′ terminus of the ASO and one nucleotide is omitted from the 3′ terminus of the ASO.

18. The ASO of claim 17 that is 16 to 30 nucleotides in length.

19. The ASO of claim 17 that is 16, 17, 18, 19 or 20 nucleotides in length.

20. The ASO of claim 17 that is 18 nucleotides in length.

21. The ASO of claim 1, that is fully 2′-MOE RNA modified, wherein all cytosines are replaced with 5-methylcytosine, and wherein the backbone is a fully phosphorothioate backbone.

22. The ASO of claim 1, wherein all cytosines are replaced with 5-methylcytosine, the two 5′ terminal nucleotides of the ASO are LNA, the two 3′ terminal nucleotides of the ASO are LNA, the remaining nucleotides are 2′-MOE RNA modified, and wherein the backbone is a fully phosphorothioate backbone.

23. A pharmaceutical composition, comprising the ASO of claim 1 and a pharmaceutically acceptable carrier.

24. A method of treating a subject having DMD, comprising administering to the subject the ASO of claim 1.

25. A method of delaying the onset of DMD in a subject, comprising administering to the subject the ASO of claim 1.

26. A method of inducing skipping of exon 53 of human dystrophin pre-mRNA, comprising contacting human dystrophin pre-mRNA with the ASO of claim 1.
